United States Patent Application Publication US 2007/0237770 A1 - sequence listing, part 12

SEQ ID NO: 1174 - DNA, 352938 bp, Mus musculus
  misc_feature (1)...(352938): n = A,T,C or G
ttaatagcttttaaaatttattataattactctaagcctgtatattttaattatttattgctttaaaattatatgcatgttaattatgtaaatgatatgttacattatattttctttctgttttttaagttagtcacacacatgtgagtgtgtgcccatgtgtgtgtgtgtgtctgagtcagtgtgtgagtgtgtctgtgtgtgtgtgtagaggccagaggataactttcaggagtcagttctctatttttaccacgtggatctcaggtatcaaactcacctgcatcaccaggcttggaggtgcccctacctgctaaactgtctcattggctcttgattgttttgtaaagatgcagtctcactatgcagccatagttggccttgaacttgaaatatttctgccccagccttctaagtgctgagattacaggcttgtgctgtaacacccagtgttcactctgatagttcacacattaacttttgtttctttgacgggtgcttatttttttctgattttttttaatagctctgaatttgccatatgaagttgtgttttgttggggaataaaagaaaatagcatatgtggaaatttgggattattgttttaattattgactatgtacacatttcgaataatgtgactaaggacaaagtggttgtgttaagaaacaacaaagtatcttagagtatggcattgtgagtgtgtctatgtgtatgttccaggaattgacttgccaagggtcttagaacagaataaatatttgagaaattcttgtttgattggaaattatttttccacagttccctgtttaattaattaattaattaattaattaacttttttgcagtactagggactgaatcaagggtctcccacatgctagccaagtgctctcccactcaaccacactcccaggcttccttcttacttagtcctttgactatcttaagaagcttgtcgttcttcacatttacaagtgctgaactaagcctgtctgaatgctctcaacggcataaaagaattacttgcatgtctgtacacctgagtggcagatcgaatcagagctgaatctagggtgaggtgtgtgtgtgtgtgtgcatgttcatgtttgtgtgtgatttttgttgttgtttgcttgatttttatatctagggattggaatgtctttgtttgtttgtttgtttttccagacagggtttctgtgtagccctggctgtcctggaattcactttgtagaccaggctggcctcgaactcagaaatctgcctgcctctgcctcccaagtgctgggattaaaggcatgcgccaccactgcccagcgcccagtgggatatctttttccagtgtaattctttattcaggaaagagacatgataatgacgtttgtttgtttgtttgttttttggctaacttttattctgtgtttcgtgttttctgaaacttttcttgatgtggagggtggggaatctcaatatcttcctttcacaacccacttggcaatattattcagccctgcgtttgaaggctggaggtagtcttcggaactttctaatttgatgattcgttttcttttctttctttctttctttttttttttttaaagctgaggttgaagtggtaataagattctgtgggtcaggatcagttgacttccttcaggaaaggtgagcaccccttcgtaatannnnnnnnnnnnnnnnnnnncccagcaaccagtgggatatctttttcccagtgtaattctttattcaggaaagagaccatgataatgacatttgtttgtttgtttgttttttgggctaacttttaattctgtgtttcgtgttttctgaaacttttccttgatgtggagggtggagaatctcaatatcttcctttcacaacccacttggcaatattattcagccctgcttttgaaggctggaggtagtcttcggaactttctaatttgatgattcttcttttcttttcttttcttttcttttcttttcttttcttttcttttcttttcttttcttttcctttcctttcctttcctttcttttcttttcttttcttttctttttttaaagttgaggttgaagtggtaataagattctgtgagtcaggatcagttgacttccttcaggaaaggtgagcaccccttcgtaatataaaggaggaggtgatcactacactcaaaggagcagctggaaacatctggccataaagcagagagacccaaagccagatccagaatatgcaagaagggcagttctccagacagggcagatacctaactacctaactggtaaataagcaggcatccattttcttttctttccatttctttccttttctttttttctttttattcaaaaggagttgcaaaaacatctgttcatccatttgactaggtactttgtaaaggcttgccatgaagccaataaaatgcaattatcctacgtaataagatgaaggagatgaagttccatgcatgagcaggagaggggggcatggagttggaaggactgtgaaagacatgggcaggtgaaactcaactgaccagtggctggagctggagaagcaaaaagtgggagttctagatcagtctcaacaggtgctaaatgatctcaggcaatggtgggtgccacgtttgtggcgcaactgtgatttgggtggagcacgacacacttggcacatgtgtgggaaagatctggaagatccaacttgtccagattttcttgaattggtgggctaaggagtttggtcattttataagcaataggaagtcactcaatttaaatgattggctggggcaaccgcatcccagggataaaaattataatcgtaggaaggagaacttggcttgaattcacaccgagcttggaatgattagaagacatgtgttacttcactggaggtgaggcgaaagatgagagctaagggggtagacgtgagagcacatggcaaggatgagagcccaaagggaagaacagcagagagggaagaggaaggggcggaggagaccccgagcgtcctgcacagcaaggtgagagcaataaaaagccagagatgggaagagtgagaaactgggagatttggtaactgggatatgaagatgaggggtggttctctgggaagaaaaggaagccagttgtaccaaatgataccgatgggcgagggaaaagcagacgtcaacacaacatcccaggtcattggagagctgtagcgcagtttctgctgagtggaagaggcagtgccagcaaatgtccttcacaggtgtacatttcaaaactgccctcgagtccgtatcatgtggagatgccttattcactccgattattttataccgagtgggtgcaaccagccgctcagtgtaggagaggctgggggagagagggtgcagtgatggacagctggtgacttaatctgctgttggttcccacccagagggcaccaagagaggcacgatgggtaaacagtcttttggtctcaggctcctcctaaggctcggcttcagctgtaagctgctttctctgctctgggagcataaccttcaagagaatccttcagaaaggggagctagctagacaggcgtggcagttgcagcgtccacactgaacccttcccttcctaggcacccccttacttgttctggcatctaacacagtaccaggtacacagactgcactcattatatatttgtagaatggatgaatcaatctaagcccaagtaggctgagtgagctttgcagaatgtgggctccattgatgtgtttcctgaaacaagaggccaagagggtggggtgaggggggcgggctgcttcggttagtggttcctactctctgatcaccctcagtagcaggcacaggagctctgctgagtctctctcacttaccttgaccttggcagagcagcacaagtggtcctctaggtgaggaggcgaggtgggcagagatggggccaagatccagtctttccagtcaaaggctctaaatcgctgccgttgactttccaaatggcagttaacatctagtaggtcaacatatttgcttgtttattcaggctgaacagtgatctcatttgatgccaaaaaaaaaaaaaatggattaaagaagtgaggctacatctctgtgattccagacacggggcatgcaaatagaaatgcaggtggcatagtcgaccccatgtatcttgtatgtagtttccagccagagctctcatatggtgggttgtcctcccaggctacaatactggggcatcatggactgattgctttcactggttgcctccatttgaaaggactgtcttcttcttagtctctttctgtgcactccatgtcctatttctaggagagagcctttcaggaaacggtctccactgtttatcctttaaactctatgttcttagagttcttagaccatttctagtttatctttgagctccagaagtccaagagaaatgtccagcacatgaaaagggctttatgaatatgtgccaagtggtttatgaattcatgaatcagtaaacatccagccctctcaagtagcatgggcctttggatttctgatactgccccagtcttgcccttttcttttctctttctgctgggtattgaaccaagggctgtgtacatgctggataagcactctgccactgggccacatccccatccttgagtttgggagatagggctcactgtgtatcccagactgatctcaaagtgggaatctgattgcctcccttttcccgagtgctggaattacaggtatataacaccacacctagctttattccttttttgaccatatcttaggcacttatatgtttctactccccaatctacccccagccctcaaaccaaagccattcaatgactgtattctgtcctttctgaaacagaaagctacccattagtcacaaggtgcctgttgtgtgttatcccactttcagtgacatagacaagacatgggaaagacacttacacagcacttactgtgtgataggtgccactccaagagctatatacagatcaacgaacactctttcataacagtctattggtatggtgtattcttatttaatcccctgggagactcttaacttaacttcatgcctttcttctgcaatactaacctcatgtctgtgacctaactcttaagcaaggaagacattgtttgacatacatcaccttaacagcagccactgcaataaggaatctgaggcttattattatcaggagagctgactgctgtttcccagctctctgtcactggaaaagtcccttactttctgggcctcagataacaaatagaatatgtctcacatctctgcagcaaagaagcagtaagatgtccttagtgctgttattactgaagaggtgttgagttaccattaagtgataggttcaaaaattcctttgggcaagttccagctgtttgatcaactgataggtactggtattctgtggttccttaaacccaggtctgcgagatgctcgttccagggctggacattgttatataaggatgtgaaattccattttccgccagagtcaaggctgtgcggtgctgtgaatgccagcagcctcccgagatgtctgcatttccatcctgctcttctgctccgctgtgcatttgcacaaggtttcctgccaactttgtcttaggaacccactcccaagccctctctgcattatgttccttagagcactgttttgcataagagtctatttcttggaaaagctcaataaggagaaaatagaacaaaggggcctctgatagtttaagcacaagccacccgagtgtaattggcaaggcagagtgatcaggattggtgggaggggaacatgtcttcagccaaggcccagattttcagattcctcaatgagtggctaaaatcttatatgaagagggcccaaagcctgtgaggtctggaaagatctttgtgaatgaatggggtagattctcaactcaccactctgtatgccttggcatgtgctccacggcctgcctggtctggggatactgaaatggctttgcctcccttctcttacatacgaggctgaaaatactcctgtcagtcttcctcgatcttgtctgacagttgaattgttcacaggagtatcagggatacaggaaaaaggattctgaaatgtaataatctgtatatgttcaataatctgggaaagtttttcagtggcttcctctgctcctattgaattctgagtctgcagatcacagcttgcagggaaacatgcagaacatttggctgctacatcctgagcatccctcacccccgatctctctctctctctctctctctcctcctcacccctctgctcctccctcccgtgtgtgtgtgtgtgtgtgtgtgtgtgtgtgtgtgtgtgtgttggtaaccttgtgcccaataagggggtatgaacttcttgggagctgtgagaggaattgctggtagtgtgaaatggagggtgtagatctcgacaaagttccactgagagtggcatagagctggtgactgatttaggacttctgagctctcaaggttggttcctgaggtactgtattgctaagtacttgtactcagagtgctgtctcaggagtgaccagtagatggtgctctggcaacagggaaataagacttctggctccctgaggctgagaaaagggttttccaagggttttaaaactggtttccagagttctgatcagttgctgcttctccacacttccatttgtggtctttaagagaacagtaaaaccagggggaaacatacttaccagatttccatacaaggatcatgatggcaatgttctggccactcctgatagttccctttagtgtggttcctggaatatttaggcaccggtcagaattcatcttgagagtaggaggcagggcatccacaggcttagcatcattgtgtctccacttgatgatatacacgttgcaattatgtagcatggctattagaaactgaaaatcagatccattagatgtttacactctgccttttatcagatcggaaccaacacctcatgactccgaagctctgctgttctgtggtctgaatcagcaccttaattcacgctcctctgggctgtgagggctatagtagtgccctgctgtagggcttatgtacactggtagctataacaatcgctggtgcaatttaatctttaaaacggtatccacctgacaagttgcaaagtgaagagaaggaagccagtatagagacccagaggtcttaaagctctcaaagctgtgacattcaggttgaaggggaaaagagaagaacacgcctcagctttgctgcccttaaaccaagcccccttctaaacctactgatgccataatattttccctggccctctgggactgcttctccaagaatcctaatgaactctaccacagagccattcctgctcccgagtaaactctgcctagatgttggtaaagcctgctccgtgggaatgcaggaaggctaggctcagccccatgaggtcccagtgtggccagtgtattgtcttgcatattctaggcttctaaagaattcagcagtcacaggactcacagagtatggaagaaagaggaacccgaatcagtactagattttggcttactgggtaaagagacaaggcaggagtccttagtctttctcggaagtacttgtggaaggtaaaaggctagtgtgccctgtttagcaaacagacacagaggcatgatgaggaaggtgttatgtctcatccttgaagtgagctttagagcagagcttgctaggctatacaatctcgtggaagttatgaaagacacatcatttatgtcatcatccatatggctcattatttaatccccaatgtctaaaatagtgtctgttgtggggaatgtacgcaaatatatttgctaaatgaatggtttgtatggctcctctgctatggaagatcagattttttttagtcccgtgaagtttacagagctctgagatagccactctgtctaggtgaccatctagtgagacttcacagccaccttcctttactctgtctcctaataagctcctcggcaaagtgagatcacaataacaggtggcactggcacacttccagccgagatttgatctgaaatgatctccgatgaatcccagggtcaacactcgcttcctgagggcaggggtgattgcaaggcatccctgtgttgaggccatttctttgcatttcttgtacacagacccttttctgtcacacacacctacacactcaacattctcatacaacagacatgtatcagtgcacacacatagacactcacagacacatacaagtaggaatacacgtgcccaacacccagacaccactttatctcttaatcagttaatttcacacactgcctttcaggcctgccgcggtggcgctgccctcatggtgacttccaacactggggctttggtttgcctttgcttacgtcttcagccagccctcagcgcttccttcgcttccgtagaaaggttatggatacaactatgtgttgaagccaagggtgaacataagtcaaggaaagtatgttccagacagtgcagatgatgggaggggacagggatagactgtccacggagtctcctgtaggcaaggactagattgttaagcacagagcttctttctctggactacatgtcctccctctgcagctcagacactttttttttttaaatgacgtaggtttgagaagatcaatggaccttggttgaaagtaaaaggtggtggtgggtgggaaaccccctttgttaggattttgagggcactttgcttaggctctctgtctggggattggaatatctgggccacctgccaggaggaaagtggaacccaatctagaaggctgctttgtaaggtcccttagggtccataggacagaaggtcccagagaagcagaggtacttctctatgaggtctgttaagtgttggtttaggaagagggcactctctttgccctggggatccctgttgatggtagtggaacctaggagatccaaagcagaggctacaagatcctagggtggggtgcacaagtccctactctccactagagcagtggcgagcagaaccctatgcagagtatggaaagaggcacagccctgagtacccttcctaggaccaaagagagtgttcctggacaggtctttgatctgttgcagagagtctgcaggcatcaccagcttcagtgggcctctcttttccatctcctgagggaaccgcgactcttccttggacccttgcctaggtagccttcagtcaaacgaattcacaagccaaaccagcctcaccacgctggactctgagagccccgcccccgcgtctctctcggatccttggccaccttgctgcgctgctgcgctgtgctcctcaacctgcccttaagcatcgtctctgctctctgtagccaggaaggccgggaggagaaagagctggtctttggtgaggaagttcggtatgtggattaagtcctatgccctgccatcactagctaggctgactgcaacctgttcctcactgcgaccgcccgcccgctcgctcgctcgctctcccaccctcttcccggcgcagccgcggatcgctgttgcatgctgatcctgggaggcggcggcggcggcggcggcggcgagcgctctgggcggatgctggcacttgggcttcgctgctctctggttgctgctcaacttctaccccaaaagcaggagctgtgaagtcatttgcccctctctggctggttcgacttctcatcttcatttttcgggcgatgcggtttacgcaggaaccttagtaccgctctcccccccacctccatctccctctctccaacctttggatgcatctccgctggcagatttaaagagccaagtcttggctgtggaatttcttagatggacttgcaggggctggcgttctaaagcatgtcaccgtagctggccctcgtctttttttcttttcatttttttcaaagttcttttgttttcatttccttcttcctctctacccctcaccccgaccaataaatcagcaaactgttacctagcggaccagtgcctgcctttctctcagccaggtgtgccagaagaggagctatgtttgaggaccgaccttctccacccctctccggtccctgaacaccaccccacgctggcattttgggggaaaatattccctctagaagccctacccccttcttcttcttcttcttctttttttttcttgaggaatggagcttcgcagaggttgcctttagattcaacagttcagagcagggctgaagagcctgcaggggtccccagaggcggtggtccctgcgcctgtgtggataaggctctgagcctgcctgtgtcttttctgcctcttgttgtgtgcgggtgttcggcgatcacctttgtgtgtcttctgtctgtttaaacttcaggatggctcgcttcggggaggcggtggtcgttggcaggccaggctcaggcgatggagactcggaccagagcaggaaccgacaaggaacccccgtcccggcctcggggccggcggccgcctacaagcagtcaaaagcgcagagggcgcggactatggctttgtacaaccccataccagtccggcagaactgtttcacggtcaacagatccctgttcatcttcggagaagataacattgtcaggaaatacgccaagaagctcatcgattggccatatcctttcttacccaccatgacttccctctccccctttgcattccatcgggtgagggggggcacctagcatggaatctattccccaccccttcctggtgccaaaatttgcccctttgctcaagtgcaccctaccttgttgcattcacggggcaagcctgatgccccggagacctatttgggcagtagtggttttcaaggtaagacttttggttttggggattattttccatgtggaaatctctaagtgtacttaggtgcctggtgtggagacatctgcctctttctgggctttgtctgtttcttggccacccccaaagtcctaaccctttcagaagctgcactccatgtggtttggcttacctcaaatctcaaggattctttcataatcagttctctcttttccaccacttaagccagtccctctgctcccattcctaccagctgggaagacacttgcactgtctgccagcagagaagttgaggttctgggagggatttgccagatgagaagctccaaagagtagacccatgtatacaagaagacaaatgagtacttatgaaaaaggcgttgggctagggactcagctaactctggagaccaactttaagttctactgaaagtgaatgcctgtcaggggagatgatcatgtcaccaccagcccaaagagctcaaagttggagttctttcttcaggcaaggaggtgtgttcttcctttcttggtcctgggttgttactcttgcttcttaatgtttgccatacctggctgctctcccagtatactgaaccatagatctactgggcctgaacccatcagctgagggtcagaggtgtgcaaacaatttctctctaaagccaagggtgttgctctttacaaggagtgggtaggtcatctatggaggtgatggtttgggagtaaaaggctaggatggaagaaacatctttgcaggttttaccaagcgcactgaatgcaggctgctgatcaggcagcttcctgcctgctctgcactaagaatttgcatgcctgtcaaggccattaggagttgaggttggtagggtgtttcaggggattacaggaggcaagccaatgttttgaggctagatgtggggggtcctcttggggacagggactttggtgcctctggagacatggttcttgggaagaatacacctgcaaaagagactcctcctctttgccccatgctccctcccccaaccctcctctcaggtgtgcagcagtgagaaagctgaggctggggtgggggggggatggggttcaagtattagtttgcaaggcatcttgcttccccccagggcctgaacatcccctgcagcccccaacctctagtttttggccttctctcccccacccctccagttccctgcctcagctgctttgggattggctggtgcatggtgcttctaggcagcagcacctcattagaaacgaagcagcatctctaagcagtgatgcttcctgctgctgttcacatcctcccacagacaccccctggctgggtttctccctttctcctccttgttctccagttctcacctccccctcccacctccacagaatgatccgggccatagagtgcttgggttgaactatttagataggggcttggggcgggggaggggtccggtccctgcagtcatgcccagtcagtgagctgcacaaggcggactgattgcattgtgttgcatgctgcggcgggcggctgcaaataactccttggagcagtactctactggtctctcagggaaggtcccttccctcgaccaccttctacagttcttttagattccccacccaccaggttcccctttgctgtgacctgcttaggacaccccgcctccagacagcccccttctccgtttgcttgcagtagacaaagcagcttttcagtcccacagaaggcaaagtgtggtcacagccctccttggcacctcggacagcgccatcaaaactccctggctggtcctgagctcccaagtcaccgggtgcagcacacagggtacttccggttaagctcaagctcccggactgggacacgaagcacgtttccaacaccaaagccttttcctcttttcatttctgccgcaaagacacgggttttccaccaggagctttgagagcaaggtgctgctcgattttatgcattcttccctttagccaaaatgaagtaaggatcgccaaaggagagattccggagggaatggattctattctcatcctcagtgtcctgtcccagacatctttgctctccgcatacttagacattgtacagtgttcctacagcctgtaggctgttgtaacctgttcagagaacatctgctaagatgttgaggggaagctggttggattttttttccccttctggttgtacagtgtaactgactaatgtattccctccggtagtgaccacgtggaagcattgtgcctctgtgggctctgcattttcttccaaggcgcataggagctagctagtgtcaccttcccttcagttcccagcatccagtttccccaaatacctgcttcatctcattgagaatcagtgtgagcaggagttacctttaaagctctctaattaggctccttgggttcaaagctcagctcctccagaagccccagtgaccttgaaaagttacttcattactctaggattcaattttcttacctgtaaaatcaggatgataacaaagagttactgggagaattcaatgggttaatgtgccaagtgtttggaacattacctaattacccactaagcatccattattattaatggaatcctttgggggatttctgcacacctgcaaggtgggacctgacattcaaggtgaagtcatttagattcttgcatctcattgagagtgaggaacctcgtctgtatcacttgagagcttgttcaaaatccagactcctgggttccacttcacagttgctaaatcacacacaggtgattaatgtgtcaataactgactgtactcccggtggtagtagtgaccagtttaagaactactttgttctttgtgggggtcagattttcacaacaggaacattgttaggaagtgttgttaagaccggctctggtacgaacatgcagtcatccaggtgcagattttaattgctgtgcacgacactttttgaactttgttctctctctctctctctttctttttatttttttgtgacagaaagtcaccgaggaactaggatggtaaggtctttttcttacatgtcagggattttaattttattgatctgaaaggatgagctaagtaaaaggtgtgatttaatttgtgcttacctgctgacttaggagagccttatcttgctcttaataggggttggctagttttaatttgaaggcaaatgtctacaataaaacccagatttgacatgaaagatggcggaaaggcaacaaccccctctgaatgcatttcctttttcttagaagctacatctgcatagggagatcgttttatttcctcacgacattctcttctgcagatgataatgtagtctttttgaaaatgctaatctgatttaaaatgtggtatcccattttatggcatttctttcttgcttgcttgctcatctaatagatctaacaagtgttctttcttcctcgggcattggctattctggaagctacttgctgctctctgtactgcactctgccattctgcctgttcttttctcagggacagttatgtgggtaggcacttgggatctctgacatagtttgtgagatagcctactcttgtttgcactttttcaggtcaggggtgaagggacgaagtggcgtgtctgacttaagagattctacatcatagatgggagattgtttttcctccacctacttggccatctcagcaggcaagcacatgtttcatgtggaaggaacagttcagagtaggaagatcaaatgtgtttgtagcctttgagtggatgaagctcattatagtgaacccggggttgtgcatgtaggatttctcgtgaagaatttcagtatctcctctgcactctggatatgggtctgaggctatgtgtgcgtatcacagatttcccccttgtaaattgttcagtgaattgtaaatttatttggaggattttgctgaggattacaggaagtgttagttctcaaatctcccattttggcatattcttgacttctctggttgcctctaaatatacatgctttgcaagatagtaaactgcaggcctggtaagaaatttgggtttgatgtaactccagtagatcgtgagtcttgactggggacgctgggaatgaacaaggatggaatctgcaatcctgccggcagaggatgtggggtcctcatattttccattgactgtagatgccatgactggggttggcatgacctttgttttctggggttcctaggattgcctgtttgttttgtcctttgtatgaggtgagggaagcctggctatgacagtgagtgccatttgtaagtgggagacaacctggaaagtgagttggaatgaacaaattcacagcaacaaaacgactcgaggatgaaagcaaacatatcttgggtgtgatagtttggtctattggtttgtgtcctgttatccccccacccccacccactttcctgctgttgccttcctttcaataggtgcagcacacagtatgaactaaaggaggaagaaaaaatagtgagcacaggcctttcttcctcctcaaagatccagattggaatgagtgacttcttctaacgctgcttatctcttgagagccattactgtccgtgatgtaggtgccacatacctgtttctttcctccctccttaaagggacatctggtttccttcagactttgtactcttatttaaagcaaaagggagtcaaatttgctaagagatcagaactcatgcagaccccttcatcatacctgttggaccattggattgttgctcttcatagttccccactctgggcactcacaggacaccattacccaccacgagagtccagtcccgcagaggacatacacacaatttgtctatcactgaccacaaagacaggaaggagtagacctcaatgcaagataattaatcctcttttactcagggagccagaggataggccttcccttcctcttccagcccaggcttctacccatcatttcatccttctgtctgtctcttcttctcagttttaggctcagcctttttgagtaattcatcattatgtgtgggtttttcttggaattttcagaaaagcaaggtcatttgcctctgcttagatacgacaatggtcttttgaaaaggaccagtatcagacaccaactgtttcctttaactcctctattgtctatggtgagactgtgatatggggaaaggcagcttagaggacaaacttttaatctggaaagcaaagaatagctggactgtatgcccttaagagggaaagaaaacggcaacacacaacttaaaagtcttacctgagatatccccttagcggagaagtaaggacttcatgcctttgcttgccatttgtataatgactgccttctactcagccctgttgctttcaggtacctgacaaataggtagctgattacctttgacttagagatcagggctaagaagaaggcatttatgtccctaagttttggtcactcagactcctcatggtagcttggcattttcatgttgagcccctgatctaagatgcaggcttctgtaaacattttaaatcccaatgagaattcagataggaattggggtggagtgttgcagaggggtccactatggctgccgccaccattgtcattgtcactggcataccacatggcttttaaagcagtctctttaaaaaaaaaagttccagatatatgagagctacacatcatttcccttaccatgttctaagccgacacagagaggacttgtgtgggcttccctgtaatgtctctagcatttaatcaaggacagaaagcatggcataaagtttttaggctcatctgatctagtgttctcttgtgtgtgcagctcatttcaaggaaatgtctgagatgcgtcttcactcgagtattctaaatatgtttctttaatggccatctctggtctcgatccctcccgctcccccataaactcagatgaatcgcatatctctatatctctggaaagcaaagaatagctagaatatgtgcccttaagagggaaagacaagccacaccaaagaaaacagcagcacaaagtcttatctgagttatccccataatagagcagtgactgcttcatgggagttgttctccccctaaacccctcccatagtgttagagactgaacttagacttggaaatatagcgcttggttagatgcaagtctcaggttcctgggatctgtccctgttatgtagcttaagggagaggctcggtgcggcacctgtgccaggcatggtgttttcgttcatgagagtggatctccatctctgtcacagctgtgtcatctcaggagcttgactttatcgccaccattggccctgctttaatggtatctctgatgaatctggaaagtatgttttaggtttgtctgtcagcccttctgcccttcagggaggcgtactatcaggagatgtagcagaaaagtcggtaactggtgagttgtaaaagaagtgccctgggtagctccatgcatggagctttgctggggaaagactatatagtgtcattgtcaagacacatggagttgtgagtggcctcctggaccaggaagctctgggaactgggcggaggattcattagctgaaaggtttttgatagtgtaccactttcccctggtttcagatcattttctcacggggctggtcagagtcgaaaaagcatgaaatgaattttcaacagatactaacatcctggcaatttccagctgtgtgctgttgggaactagtttgccactgttctgtcagctgccatttctttcagtaggtgatttccatcagcatcagggttaatgcctcatttgggtcctttgtgttgaagtcagatgtgtgcactctaccggattcattaaggcctcagcttccaaacttcggcttgcctcagaattacctgcgtggctttattagaatacagctctgtgggtggatttgggctcttggagttcccgactcagtaagtctgaattggggtctcagaattcttatttatcacaagttcccaagtgttcttgccactggtggtcttggaaactacagagacgcagctcccttcatacagtttagctctgtgtgtttgacatatctttagagacagcttcatgagaattgctaatctgccaggcagtggtggctcctgcctttaatccctgcatgtgggagccagaggcaggttgatctctttgaatttgagaagggtctggtctacagaacaagtttcaagatagctagggatacacagagaaaccctgcctcagaaaaacaaaacaaagcaaaacagaccagctaggaagattatccagcctaaatctgcctctgctatactaacctaaatctctgctgttagcagaaacttatttttgggattcagacattttgaggcttccagatcattctaccaaagtaatgatgggatctttggaatgggaatacggactctcagttttaagacattgttaacttagagtgagttcattccttttggcctcatgacagagaacaggctcttataggaatgggctcatgcgttttaattccagcaccccgtacactgctggcacgtgacaagtgctgcatattcttttattgaatgatttgcaattaaatatgttgctattgacttaacaagcgtcaacaaagtgattaagctgtctctagtactgctctggctgggatctgcaggacgggggcactctggtggttgttagtatgagagtactgactgctgggagaaagtcaggggtcattacatgggaatcgggagttaggaaagacaagtatcgcgtcacagtgttctttagaattgccccaatttctatatgacccaccacaggcttccccgctgttaaagaaaatgcagtgtttattttctgaaaaattccagtgaaaactctattaattggcacccagagatctataatgtaatgacaattgaggtttctaatgatggcctctaggcacacagaatactggagtgccttctgaatattgtcaatccagtgtttattgagattatgttcaaacagtctgaataaactatgccccatattttgggctttcacaaactgtaaaccacatccacacataaagagttatctgttgcaactcattaattttgaaattatttatttttattttatgtacattcatgttttgcctacatgtatgtctgtatgaaggtgttggatcctctggaactggagttacagacagtgagcggccatgtgggttctgggaattgaacctagatcctctggaagagcgacagtgctcttaaccgctgagtcatctcttgagccccatgatttattaattttttttttttaattatcagcttgttaaattatcccaagttctcttctttctctggctctagtgggtgacagagagcttgtatttatggctctggaagtcagccctttcagctttagaatccacaggattggagctgagtcctggtgtaattgtgctttagcacgtcagcagggggtggctctaagcatttacaaaggatgggtagctcagtgggctttgcatttgcttggagagctcccagttggcaagctgatattataccccattgcacgattatctctatacaataacattgaacatggctgcctagaattttgaatagaactttgactaggcatctcatccagggctgtcaggtgattcctttttcaagcggactctgagtatctgccatttgtgcccggacccctttccatgttcttccacacgctcacctgccatcttctcaactcaggacaaaggatgatggactctaaagatcttattgtggggtgggaatattctttgttttcttaagggtaagctctacattttgtggaactttaaagtggggaatgacttgaatggctgtctcgatggcctctaggtgactgattggcatactggaactattaggtttcttagtacacggtttttaatgtgggggtggctcccattctcttgaaagaatacacatacaagtttgcactcagtatcggggttccacgagtcaatttaagaataatgattgtgttagaaaattcccacatgtctggatgctgggatactgggtgcttaagaagaatgttccctacctacataccacataccttacatctagtgtgataagaatcctttgtgaacggaccacagagaagtgtttgccagactgtcatgagacacacattctactcagagaacacaaattcattagagatcccttctccatctctagacaggcaaggacaaaatgctctctgttacttaaaacccttaagaacaagaaatcaaaatactctagagcctctgtgtgttttattagtccttttggtttctgctgtataaggaaatgctgatccagtccacatatttacttactatccttgtggttctggataccattatagacaagaactcctttcgatggcggttacgttttgatttgtattacccttaaattttatctgatctcggttaatttagatttaaatatctactcgtggctagtggcaggggcagataagccagaaagctgtttcctctgggggttgatgtttattaactttgtaattgagcttccttggcttcatgtgcagggtgtctcagggctcactgtaaccggcaccgtttccatcccagctcccgttctagccagcccagtgacagcaaaggccaccagcctttacactggctactctgtctgtctagctctaggactgtccttagaggtcattttctcgttgacaccatcgttgattgctcttgaggagaataagaccaaacccttcctctgggttcccactgagccaccttgtgtactatgtctaccccaacacttcttcccatataacgtttgcattggttgaaaatacaagcaagaggaagagccacttttccatgactgctttttaaattcccaggatatagaacaatataagcatatttgtttcagtgaatattcttttgaaatgagaagtagccttagatttctgacttgtggttgtagtcaacgaaacttctgatcttttcacattaggagatgacagaattgtgcctctagctttattcttagtttgatctttagtttgagattggggccctgatttgttttgggtttgttttatctccttgtttatttctgatgttgctatccatcctatggggatcttttcaagtggaaaggaaaactactatctatgtatggccaccaaaacccagcctttcttcatttaaacaaaccaacagccacaagacaagtatcattatcaacatcttaagcaggggaaagctgagggtaaagaaggttaagttatctcttcaagttcaaccccagcaagcttgaatccagggaatgggactccagcagcaactgctgctttggtcacacatccgtcatagtctctgcacaggacctccacccactctatgtcatctgcaggtttgataggcaagtgctcttagagttgagtcaaataattaataagaatatggttagaactggggactcccttactcttctcttcgatgtgttcgtaagtactccttgactgcttggcttttctcaaatcttttgaactgttctcaagccaaccgacgcttctttattttgtctgtaaaagtactgtgggagatctcactgtcatatgcttcactggaatcaatacatgctttcatgactatttcatgtctattttaagctaggatgcagcatcttgccttttccaaagtccactttaggtactgctttcagagtctcagatgatagtttattttttttttttactagatgataaaactcccaggagttgagaggctacgggcatcattgagtctactgcctacactgtagagtgtagggaccaccagtctcttgctcaaagctggagagtacatcaatgttaagggtgtggcttacagcttcaagtctcaattacacctttgctgcttcctagctgtacactttggcaacctgcttaactatggcaaattgtgttggttttttttttgtggcattcaggcaagacggcacataaaaaatacatagcttagtgatggacacaaagtaatccgtgaatgactcttagttgttaatatgtagttaattatggatgattcagtattaaatacctgcagccaagtttcccccttctaactgtattgtctcgctttctcctgacttttagcagatttctaactggagtttttccagatatacttcacgtgacctctgtgtaggcctcttcgcatacctgaaccttggggtctcacacctcagctatgaggaggcagaactcatatcccctgccaggctaacttgcaggactgtttgagggctagcgattagctcctactgaggatgaaagccctctgcaaacacatcagatattagtacaagtgctaccagtgatacagttcataaaagtgcaacatttattaagcacttactgtttgcttagtgctccccatggaaagcacctgttgaaaccattccttgtgagcacatgcagaggtgctctcttacatttgctgcttcccacagtcaggggaaaaggcttggagaggtttactcatttgtttactatgacacaccgagcaagagctggaagcctcattggacttagtgtttttagctgctgcagctgatagtggtacatgaaattttttcttcttgctttcttccaattattgagtttacattaaaaaaataaaatttaaagcatttacatcacaacgggtcctcatttgtatatttttcaaatgacgattttgcaccaatattttctcccaggactcattcagatttatgatgccaaaaatctcaaggggcaataatgggggagaatttttctgcaagtttccgatgaaagcaggtcaggtgttcaaaaccatcaacagccttcaccaaatgcactggattctgttttcacttatataaaattggtagccagagatttttgaatggcccagctggaggcatatggaagggtcactgggaatgacagttctaccttggccacctgacacattctcgggggttaccagccttctagtaaactctttcttgtcagttaggctccttggacttgcaagatttttgtgttctctcagcaaagagagttgggatgagtttctgtgaactgaggacgaagcttctgaaaagattggagagccgtgtggaggtcaggaaaccgagcctttggaagtgtgtcctatgagctctgtgtatcctggagggtattctactggtggaaactgacatgtgtgagcctgtaggattaaggatagaccacttagctcctggagaccagactgaagtctctgaagcagttatggagtgggtagaaaaaaaaaagttagaggaactgtctctctattctgctaactttggattgtatttgcatggaaatgagtgtttgtgaaataacggagccatatggatgcgctgaggtgcatgtgttcttctggtctgttgatagaggagcagttgaagggcgtgggcttatctggaggtggagtggatgggtggatgtggcaacacagggaggggggctggtctgcggaatatgggcctgtgcaagtgcagatgatctggacattttcacaagatggccctcccttatagagggtaatgtgtgcaagcatttacttttgaaattattacccctcttcaagttctgttgcacctctggacaatctgtctggtgacaattagagggtagaaaatgacaccattgaatgcacaagccacgggctcattttcatcacaaatgtcaatgggcaaactcaggtaacaaagcacggaaacagattctaggatgttataattatctagaagtttgcatactctgcctgaaaggagctttgttgagaataatattctcagtaaggtagaccatttctctttttttcttttagctttctttatttctattgtatgattttatcagcattctataaagactatctgccaggatgataagcgctcaggaacagagaaaaactaagctttaacaagtggttattgtttaatggtcactctataacgtgtttttgagactgacttggatttaactcattgttctttacagtcacctggggcaaggtcacagacagctgtggtcttaccagctgtgcttgctggtccctcactatcttggcagaagactgaaaagctagccttctctaatgaaatttcttcttggactagcactgtgaactgcttgtgtgtttttgtggtacccactgggtatgaggctaaacccatagatgagagaaggacgactaactgagtcagagaagagcaaagctctcttaggcactatgaaatgggcctgggacatcttggtttgtgtcactgggatgccagtttgggttgggatcttggatctttgactattcccattttttcctgatccctttggttaaatgaactacattgctttgcccaggagcgttggtttgctgatgccaattttcctttcaccattatgtgaaagtctgtggggttttcatgttttcagtgctccaaaaacctcccttagtcctctctgctccagggtacccgagtgggattgagttgtggaggtggtagcttttatgacctctccttgaacttttgctcattgaatgtctctgcttttggatttttttttttaaactgggacatgaaggctgcagaagagagttatcttgaaagaatgaaggaaaagtttgtagagttttgaggaaaacagtcttatgttcacactcaggccagttctctctattgctacaagtatccagtcaaccccactggtcatgggtttctgatcactgaatatatagaaaatttctatggacatctgacactttaaataggtcctgctatgccaggatttccaatatgaatgctaccaatagttttcttttttcatttgtagcttcacctaaagcaacttcttttattgtaataatggatggtcatttttatctcccctacttgctttcctaataacaacacagaataatagagcattagaattacaagattctaggagaaattctgattggacccttagttatctgtaggaaaacagaaagtcaaaggcctcaagggacttaccacaaggtaataactgactgtgtgttggctagaacatgctgtgaacctcaagactgtatactagaaagacctattgctagttgtggtgtgtctcaggctgagcacacacctttaatccaagagtgctgcagggtatttgatcacactgtgagagtgaatactggaagaaacctgtttctagttgtgatgtggctcagccctaacacatacctttaatcctggagtgttttgtttattgtaaacaagattaaatatagtcaattataagtcaagaggtggagcaagcaaacacccagttagttgacagggagtgaacatagagaaaaggcatagagagtgagaggagcccggaggacagagagagagatgcccagggaggagaaaggaggggcattcagtctggagggttttaaaggcagtatcaggaggggcaggagcttttaccatacttctatgaagtatgtctatgaagtatgacggtcaggtgtgcttcctctgtctctttgggctggtaggctttcacaccagcatttggctcccgagtcttcattgggtaaaactggaaggactgggattttgttttaaaaacaacacctgaccaacagcttttttgatccctttttctcttctttcctttgtgattcctctctgctcagtcctctccagctccttcatcgtccaaggcttccttctttttctgttagtgtgtgggtttggtgctttggggctatctggaagagtgtatataaggatcaagattaataaaaaaaaaaggatttaagtcacaaaaatgcaagtggataagaggaggctaattcatatagatgaggtcgtctggtgcaaatatagtgatgatgaactaaaggattcatgtcattggctaatgctctctttcccccaaaaatgatgttggagaaccatacatgagatgaagcagtaggacaggacccatcagggggcttccactaaacagaaaaccaacactaggttgcagcaggtaggagagtgggtggatgctcaggcaggcagtcctctcagaatagtttctggattttcagtggcctagggaaaggtaaattctccagaccccactttaaaagataataaatgctctttaaggatagttctatgaaagacataagcaaaaattctaagatgaagtccttccttccttccttccttccatccatctttccttcctttttactttatctcttcaagcaaggaagctagggtattgatatttgattattctgatgaaaacttcccaagactttggagggcatgaagatgacaatccagaggagttcttgttcttcttgttctttcagtctttgtatccatgccatagatgaacggtgtgctagatagttagaactctggtgttccctttggctggtccttgtttgcctttggaatctcagtttctgtaattgtcgatgggtctgtctggtttgaggacactactggcccctagtatcgaaatcacgagtttctccttgactgaacatgaggacaagtctgcaggtatctagaaatgctgatgcctctacaatagccaaggcataaagtatctggagatgggatacaacacttttaacttttgaaggtgtctctagtgatttggtagttcagttgagccagagatccacttttctagagagatgggtcttctatctaatccatttacccatcttcctccctctcccttcttcatttatctacccccttcctctctcctaccttattttgtgagatatgtgttttctctgtattccaggctgacctagaactcaagatactcttgcctgagcctcaagggcatggtgggtttcagtgtgtactaccatacccagctgtttctgtttcttatatatgcattttgatcatgggtggattcttctcacttcccttgcaggctgttatgaaagagctggagtccctgggcactctggaattcatcctaagataataaactaattaattctaaggggcattgggttggcaaaaccattcacctacagcttcttcaggcagacttttgtctgatccaagacttcctgatgacaggtctagaaatcttagtctgaggagcagaaccctcaggccttcagttcacccagcaggcccttgagtacccaactgaagacttcttaaccttgattcctcttggttagtaactactaagcctctgaaggttgacttagcataatgcccatcaaatggaggaacccctgaacattcttaacaatcttctaggaacatgggacttacagtaaaccatatgctgagactggcctctccatactcttgagtgtcttttgtgtatgtttcacaatccctgatgtaaattggtagctcaaaactggtcagaaggatgatattgacagtctagcatttgcaagtgctatacatgagggctttctccctgatggtatttattagcattgcatttgatttacctctcaaaaataatctgttttcttatagacagtagcagatctaaattctgtatattctgtattttctcagatctgcccttgggagagagggtatcgtagtctttagaataactttaaaagagatatcagatttatctatttcaaggtggcctttggttgttcgaaagcaactatgttatctctcaagtctttcctttgcaagctgagtattagttgcttcaacacattctcatctggtttctacgctgagtggtgtctttgaacatgggtacagttgcagagttttcaaaacaaaaattctcggagcaaccatctctttaacaaaaactacttcattttcttgcctgatatgttctcagcagcatttgatgcctgctttgtgatgtgtgagtctatgaagtagggaacagcgtggggtgtggctgttcattgtagctcatgtttttcccccttaaagtacaagtcgctgccagaactcttgatggacccaaatttgtcagagtgacatcaaaacactaattctggtttctgaaacaagtaatttccccaatgctgttttgttttttatctgaggcttttagcgtgtacctcttcattcagtcatttgtctcttgatcaccaaaaccacatgtggaatgacaactgtttttagtccaagatccattcagacacataacaaatgaatttcttaggactccttcaggtgatagccactggaatgggcatgagtagcagaacaaggagggcagggcagtcttctttttcagaagtattcttatcactccctggcagttatgtgatacaaatgggtcttgaactgtctgccacttatcatctgtccctctgtctctccaaagtagcaacaatgtgaccttcctttccatgtatttgtgtaggaaacagggtcttggaagtcagacagagttctttgatctagaagccacaagaggtgagacatagtttcacagttgacaagagagtaacactaaggatagtttgagtaactgagttcactgacctgcctagtagtgcatcttgactgacctcgggggcagaaggcctcctgagggcccctcggcctccgtgctgagttctcaccgatgccttccttgccatccattcactaggtttgaggttattaggagcaggggtgatggcattttcattttttgacaggggtagggtgggttgaaagagaggtacatgaatgttcagggttgccagtcagatagggattggaaaagaagcagttgtcatggtgatggtgggttgcatcccaccaccatggaaaccaaacttaaaaaactgatgttaaggctggaagtcacatgatatatcattttgttttgttttgctttgtttctaaaaggaagaggggtttgatttctatccctctctcccaccctctctctcttaagacgagacagggaggtgagaaaaactgctcagaggataacaacgagattgtgaagcaggacagcatggagtacttaggaacttctgtctcatgttcttcttcttctagaacagttttcctgctgttgggaagggatgaggaatgtgcttggagtttcacatttgccatcagagctgtgcactggtaacgcacatagagaagcacagggtgttagttctcctgccccgagagggcccagcctgaactcatctgctcaggacacagaacccaaaagcacgcggcttgaagaaatggggaaatggagctgagcgcacgacttcttccagatgtgaggacggtctgtatgttgattctttatagtatctgatgacatttgcagcttttgtgttgctggaagttagtgccctgctgcgtcaaaccagtctaaaaggtttttatctgatagtcacaaggactgctaataacccaggatggattatacttaggaggcacttgcgacattctagcctctccacagccatcagagttctaattgcttgattagccttgcaaaaggctcagagtaaggcacagtttctttccaggaaactttggttctcacttcctttgagctgttccatcttgctagtctgtccagaggaataagcactcagaggtgttagaaagccatgttgaagttctatccttttatctcccacgtgccccttgtgcccccactcccacagtgatcaggagaggaagtggtaagatttcccccaccccctcccatgaagtcattgggtatagggcttctctaacaggtgtgaatttccctttcagactgaagggcatgtgtagacaggttaggcagtagagagtcctggagggacattgtttgggaaagggtagggatgaaaacacagtctgttgacacaatggccacaatgatggctgtgccagttgtttcggcacaggtccagcctctttgctattattcatcgctgccagacagatgtgtttttctctgtggcctcaggcagagtggatgccatctcacttgcatgagctcactgtgtctccatcagggtctgctggagctggagccggagcgggacctctgtggtggttcaacccctcctgttcttagctctggccctgggtgtgattaatgtcccttctaatcactggaagagattgcatcagagccatcagcttcataaatcctcctctggggactgctgtttggaagagctctccatattcccaggaggtcctgggccaaatgtctttgctttcttcccggaggcccattaccataattttcttttaaaatctttactggggtagatgtctttggtgttagatcatagctgcagccagccagccccctcctggagactgtgaccacagacagatgctctccccaaagtctcaagcagtagcagacacttaagaattgatttagtagggtaataaaagtgacctgcgatctgtttagggccttgtgttcacctgttgttttgggtgctggtccttttgtctttctagtttcttctatggaagtggatggtggtggccttccctttgagcaccgtactggggcaacttttgcaatgaaagccctgactcctgtttctcatttccaagtttcattctctcctccgctgtctatgtccaacacaagatcctgatgttttttccagtcatatagcccttgaagggctgtgtcttactatttattacttgacagtgtctctttggaacagagcttctgacagagtcacacaatagacagactctttcccagctactgcccttgagttaataatcacatattacatttatgtgcagctgaggagtggtaacatatgcaatggcatcaaagtcgttgtctgactacatctcttcaaatcgcatatccctaaacaagaagtctgaagcgggaagaggattcagaccttcttgcaggcagttagttgtcctgggtctgaggctagagatagatagggatggctaatggaggttgagatctatctcctgggagccagtgagcacttggtgagagtctcccgagttctgacaactgccagagtggtcacattcttgttcctacataagtgtcttctccattaggcctggaactcaaagagaacatcgtgttctgtcaacctgcctgtccctggtggccctcagatcatattcatttgctttatgcacggtgataaaggctctgggaagggacagctgagagcagaggggtctcagaacaccccacagatagggctgtatatttctgtaagaccccccccccccacttccatttgcttcctgcagcctaagtcttccccaggcctgtgcctgcagttgtgaaggcgagaggctggctcagatgagagcagttctgcttacaaggcaatgcaaggcgcgcaaccctatcctagggctctgttggcaatcagagccagcaccatagcagcattaggtccaccctctgtcttgccccagctttctctgctaaagaaggaactaaacaaatggcaggtgtgcgggccgagccatgctgctcaaattagctgtgttgctaaggaaacgagtcaactggttgaaggaaggagcattgggtaaaagggataaatcaataagcgaacctatttttatcatttccctaatgattgtcttgaagcagttagacagggaaggggaagggagagccgcagacactctagtcctcattaacggcttggagggagtgagcagtgaaggggtgtttgggaaggttgccaggaaagtttatgaagtgaggcccctagtgagcagacagtgagagagaggggaagctagctcctttgcaggcctgaagctcttttttggtcatgttcttctttgactcggtctaggcctttgttcggcagcatttgatcttccctggatcttgcacaggcttccataaccgtcttctttatattcaggattgtggtggattttggcattggtttgattttctttctccctcgaatacatatagctttaattgattttatgattataagttaatacgtgctcattataacagtcaggcaatggataaaggagtaaagagaaaaatgaaaataaccctattactcagagaaaactcattatccttctagcaaagccgggccccacccccttccctctctcttaacattaaagagaatgtctgtgcatactggctttttttcgtttttgatagataatgtatgcccacagtatgcagtacaaaagttcagatggggatactgtgtagagagaatgtaggatgtctttttataatgataacccagactctggtgtgcctgtgccatctatgtattgattagtcccttattcattaaataccaatcattagatacacactattcccaagcaaagggttggccaccaggagcaggcaaagcctctgccctcagtttcccaggcctttatgtttcattggtcccttcagacaaccacagacccaatggattcacaagaggcagaggcttatgtagcttaaatgaaaaagagctctttcccagttcttcccaggtaggtcctgggtccatggaggtgctgagtgggtttctgagcttgcagcatgcgtgcgtgtgtgtgtgtgtgtgtgtgtgtgtgtgtgtgtgtgtgcacgtgctacatggaagagtcaataaatgtgtcactcaactcagagataccagcccctcctcaacttgtgatggccaataaaacctggtttttgtttgtttgtgtttgttgttgttttaattagggctcttaaccacagtcccatgagggccaatcccaagagagatgctctgaacaaaggactgcctggtgaagcaagtctggagtgtgctgtgtactgcttcccaccccattgtgtgtgcagtcacacactgtgtacagtagcattaaaggctccaagcagacctgctgggaaggcacctacttaactttacttaacccaggcttccctcatttatttgattgcaactttctgtagcactagtattttgtgacctacattgtagaggcagcaccccagatgccctcagcatctgcagccattcatcaacgctgctttggcacactgtcagtttcctttctagaccaagttcccaggcaaggtcagaaattcctcagccaccacttttgcctgattctctctgtcaacagattcatcttggaatcccaggcatcggcaccaagcccagcagagtttagcctgctccagagtcttgtggaatgctgggccctgggttagccttttgccactttatgtgaaaagctctagattagagccagctatatgagagaggcatactccttctgatccttgtgttctggtggccttgtcagggtgtgagttgggtggggacttgtcctaagacaggggatgtgcgtgccagtgtagatcccagaggttgcccttagcttccagagtttgaagcagaaagcataagagtccttatgggctcccatgcagtggcttcccttccgctgtgaggacttcaggaagcataatagaatctggggcagaagtccatttggaagtccaatgaggctcatccattttctagatcaggtggctgagcatgaggaagcagagaatttctgggttggggatgctgtgtgtgaactggagatgtgtgggaaggaaggactgccagctgtgggagaatgcctgtgactcagggatccgtggaaatggtggtggtggggatgagatggtactaccaaatgctgtggactagaaaagtcacctcctcctgtgctggcccaagaccagagcaactggagggctactgatgtctctgtgcacacttggccactgcttgccactctccagagatccctagatactcatttgatgccattaacacagggttacagtggaaatgggaagaggggctttggggtacgttggggtgattgctgttctgtacaaaagaggtctttaggccctgtgtcctacactggcaaccccgctctgctctatgggggtgacaggagaatggtctctgtccttccctctttgtgaaatacactacctttctcccctgaccctgagttgtggaatttgccagagaataggttgaactgcaagactagtgacacatctggctcgtgtttgtcataacagtaattacagaatgaaatcccagtctgcaggatgactgggccctgggagggagttggtgtttctcttttctagccatggccccacctccccttgagcttgcagcaaagccttgcttcaggagtcagggagcctgctttgaatcataatttttttgtttttgtttttcttcaaaaaggtagagaattcctcactggtctttataaaaacagccggggaaagcttatatatttactcactggattcacagtttggtttctagagcctggactttgccatgggagattccaacccatgctatgcttttctgttacctataaatgcaggatcttaggagagaataagaagggaccattctttcttttggtttcaggatgtgtgttctgtgtcagatattacagcagaagggagctcacatggggtaggggaatggtttcctttccagggattctggattcttctttccctcagttgatcagaggttctggagagaagggtaacactagatgcaattctgaaagggtagcagatagccacagcttggtctttattgaggccaaagctggttcttctgcccaggcacctgaagcatgggaagaacaggattcttgcttttttcttcttcatcaatttgaagccctgtttcattcctggatttatgttttatttcactcagtgattggattatctgacatatacctaactctaatatttcctgcctccctccttttcttaaagaaaacgcttcattttcacggagcagtcctaaatgataatgcctcttatgcaaagggtcatatgctatcctgcctgcctgcttgctagtgcaaatcattcatactgcaaggatcagcagaaggagtttgtatatgtatgttcacagccatattagaggctggatccccccttacatgaacttggtccttaacacctctgtttcacgccatttgagtacatgatcctggccaccatcattgccaactgcatcgtcttggccctggagcagcatcttcctgaggatgacaagaccccaatgtctcgaagactggtatgtgtctgctttctctgccctttctcctctgggttcctttgactccctccccccacttcctctctcatacagctctgtgaaatctctactctttgctgagggacaagttagcaataaaccctgctgggactcaggaggaagagggcattgcaaatatggggtatatgcatcacatgacagtcaggcaagaagaaagggcaggcatgtgggacatttgcttcactcctctttcccaagggactgttggagtgagaaggaacatggagggaggatggtgaaagccgagtgtgttggtgcttatgaacttgctaaatgccgactgacatccttattctcctaaaggaatgagtcacatgtctaatgtattcctctagaagagaggacacaaattattttaaatctagacacatgggcgagtggccacacaaatgatccaagcatgagaactatgaagtttctagctagagtatagacccaagaatggagaaataaactccttctgggcaatgctatgccatcagggacttccaggagaaaaattctaatctccaggtgggacacatctgtccatttctacaacccttttccatactctgtgtattccatgcagtttcaggtcctcttggtgcttcagtaacctaagctgtacccatataaaaggctagtcatcatgggtgtacaggagagggtcaaggtgtgccttggcctgtgtctgacaaagaataattattctattgttgctctgttcttcatccttgcaggagaagacagaaccatatttcattgggatcttctgctttgaagctgggatcaaaattgtggctctagggttcatcttccataagggttcatacctccgtaatggctggaatgtcatggacttcatcgtggtccttagtgggtgagtcttgcttcttgcttccttccttcttgctgtgtgtgtgtgtgtgtgtgtgtgtgtgtgtgtgtgtgtgtgtgtgtgtatgtgtatgtgtgtgtgtgtgtgtgtgtgtgtgtgtgtgtgtgtgtgtgtgtgtgtgtgttgggaggctcatggtgacatgaggtagctggtacaaggaacacacagaggacagagatcagaatgtacagtagaaaccaaagaaaaagatcaaggctgagagtctccatagagctagaccataaagaaaccattcttggaagagttgggtgtatgttgcattagatagagtcatggactctcaggggtgcctggtgtcccattgtatacttgcttgattgctcaacacctagttttccaggaaggagccttttaactgaagcaatcagcttgtgctggtctagggaaggggtcatcccaagagatcagtcaaaagatgcttgggtgtactttctttgggagtttggagaagattccaactatgtttttctgaactaaaagttaagagaacagaattaatgatttgtagatttattaatggcataaaattgaatcacatgaaaatatttgataagacattccttagaacttattatagtatatattggaactgccctgatgttataggcacatataggatggcgattcatttaggtgaatatttgcaacatcattcctttggatatgatgatgagtggatgtatgaggatgatgagtagatccatcatctgttggcagcagatgtgatgggctttggcactgggagtgataagaatactgtccaggatttctatggcttgtgagtctttgaatccattgtctttcagggcttgctggggagaatagtaaacttgcataggtgaggattaagtgcttggcatagatatttccatccttaggtgcccaactctctggtgaggacaagcaaagacatgggacactgaagagagggattatgtagccaccactgtgactgacaaaacacgaggaaaaagaaaatgtgtagggagtttcaagactgagaagctgagcttggaaacatgaatctacccactgtcttctaacacagacacagtgctcacatttttagcttttaggccaattgtaattgagtgaaagagacgtagttaaaggtatagttgattagaatacagcttacaagcagccagcctcagtatgggtagtggataaacagggctgaatgttcatgtttagaaagtatccagtgccttacaaaaggattttctgtagaccattttccaaaaaaaaaaaaaaaggttctaatgcaacattttaaatattacttagtatataaagtatcacagaagtatattttcacagaaaatgtagcaactggaataatgttttaaatgtctctaaaatcagtaaaatatactgtattggaaaagtcctaagtgagaactgagtcatgttattttattccatttgaaatcatattagtgtttgttctgttttttcataatacttttactgattatttgtgaatttcacatcgtgtgccctgatcacacttacttctcagtcctcctctgtctagatccctacccttatggcctcccctaaccccacccccaaaagaagagaagaataaaacaacaacaacaaaaacaacaacaaaacaagtccaatttgtgttgctcaaatgcttgctggagcatggtcagactcccagtggccagtcctttaaagaaaacagggtccttccccacctgtacccccaccaaaagtcttcagttcttcaaagtggagagctgcacttcagcattttttatcacatttttaaagagttctctttgatggctttccgtctaggctgttacttttggaggggctagggtttgtcacagaagccttctatgtccctctttctcaattgttcatcttcagtcaccgaaaccactgcaaaaaagtagtttccttgccctttatagtcagcaggagtgtggatcatggacttttcacatggtttctaagggtagcatgttggggtgtgtgtgtgtgtgtgtgtgtgtgtgtgtgtgtatgtcattggtcctgctcaatgttatatgcactgaaaacatttgaagtttctgttctaagccactcattttattttaaactgtcatatattgatttttaaaaatacagaaaaaaaaccagaagagaaaaatccttgctgactgattaaaagcaatttctgactttaagagcaatttctggcttttatggcatctctttccatccctttaaagcgaagggagctttcttttggatgtctgtaattttgctgcctttctcaatatatgatgagcatatcacacatcattctgtactctactgaaattttgtggtgactgatgaacactttattaagtggatacacacagcttgttgcttgtttctgcttgttattcgacacttagattgctttcttgtttttgctatgataaataattattaaagatgctctaacatacatcttttagatgccacactttactagacagtttgacaggctgaagtgcagtcagttctctgtatctttggcttctgagcagacccagtcaagcgtggataggaaatatttggggaaaaatatatctgtagtgagcctgaaaagacttctcattcttatctctaggccctaagcagtatagaataactaatatttacatagtgtttgtcctgcatagtcttgtaggtaatgtagagatgattcaaagcatccagaagggaggatgtgcatacaatttatgctagtaacatgacatgttatataacatatgtgagcatgtgtaaccttcggcatccacagtctcagacccagtctccttcaggtattataagacagttgtactttgcagggggaatctggtggttctggtgtgggaagtggggactctgatgtgtatggggaggtggaagaccctttccatctgaccagacaagggaagatcaatgtgaactttgataagggctgtcaacaccattgaaggagcagatttacgggaaccagccaggcccttttgctgctgtagctaagaagatgcctattcctcacctacatttccagggagttctagcacttggccaagtcaactgttctgtgtgtgctgtctcaccagttttcttggtggtttctcagacacggatggctctctgggtaactttgactatgggtacttcctagttgaacaaacaagactttaagtcttgatcccatctcacctccagctcaacatgcaggagctcttctcagctcacacatagatgttttccaggtaacagttcactgtgctcttgattgttgagggctgaggttccgacccactgtaatggaatgggtaattgaactgtctgtatttgtacactcacctaccaccttgcttttctgctaagaggcataccatctttggagtctgcccatgtctcagaatacgagcatggcagtattgatggtgttctctttttctcagtggtgcattaaactagggacatttttacaattatggcatctcaacttcagttcacatgttgcagtaccaactagtgaggtgggcagaacagactgcagagatgggttattcagtacccaggatgttatatcattttcttactgtctcttgctttctggtggaagattctggggtttagagaatgctctctgatgcagggcttctatttttaaagcccactccatgtatcccctctcctggccacacaatcttcctttttttttctccttcttgacacctgcatccagagttattcctgctgacagcacttccttcccaccttgtcttcaggtgtcacctcacattctcctcctgtgcacagggggattgacagtgttggagcatgacacgatacttcagggttgaggctgcataacatcttagttctcggttctggtggtgggtggggggcgggagggtcgggggcaggagggtgggtgctgtagaatcatacagctggctcagcacgagacctgtcatcattagcctgctgctaagaaacaagtatttttggggggggggactggaatccctacattctgcctgccacccctaaccttccgtagtatttttagtatccttagacatgtaagttgaagatgtgtatggtttaagtcagtcatttaatatattcacctataaacccataaaagggctgtccgagtccattttctactgctacagaatatcagacactgcgtgtttttaatttttttttaaacagaaaagatttatatcttacaattctggtatctgaaaagtcttaagagatgattctgccatctgatgaagcccttcttgctgtgtcctcacagagccaatgacatcataagctgaagaagagaaagaaactaaccaagctcacccttttagtaggagtctgctcctgtcataagtaaccaattctggtgatggcatatagtctatgccatagggagttgtctgcatgaccaaatcaccttagaaaggcaccagtcttgctacatcacagaaccgcttaaatttcaactggggcattttcagggagactttggattacagtaaggatcttgtcctcattttccagacaacaaaattgaggctcatagagggcatgtgtctaaacagcagacactatctaggacagtggttctcaacctgtgggttgtgaccccttgagggtggtcaatgaccctgtcacagggctagctaagaccatcagaaaacatatatttatatcacaattcataacagtaatagaattacagttatggagtagcaattaaataattctatggctggggcggggtcaccacaatgtgatgaattgtattaaagggttgcagcattaggaaagctgagaaccactgatctaagaacttaagcccatgtcttcagcctctaagcccgttctgcaacattcttccttccttagtcacctctgctaactcaaggctctgtattcatagatctccataattcatattcctttggccccctagaaacagtggatggagcatggcagggctgcagatcatcatacaagtgtttccaactcaaagcgggagctgcaactggagtttgaagagggcaagctctcctgtggctttctgaggcttcagtctgtgagcttgcaatacagcgccttgctctatggcaaaggaagtcagctcttgatgtaataatgctgtttggtgcctgacaagtagatcaaaagatccagctgacttctttgtgaattggcttgtttagacactcattcattcatccatttgcttattcaacaagacaaatcttgttgaccgagaaataccaaatcagtttaattctcatctctgctgaaacaaacttttgtctgctacgacgtgggatcgctcttgaattggtaataattctggagctttatgtttaaactcttgttaggccacctggaatattctatattacttaaaatactattatatattaatcttaacaggaagttattacctaaacatatagagaatgataggagatgataaaaacttaggcatctctaaaccattttaagagcaaggaactgggagacatctgggctttatgacttttgttcatctctgtatgcccagagtctggtatatagttactgcttgcaaattttgacatattacttgttccactaccaaagtcttacaccttctacaggatgcaagaagagtggtgagcgaggcctaggcctggagcagtgagagactgtccttacaccttccctttggtctcactgggatttgtgtctacaactccatctgcctagcttattttgttagggaaatgaagctgagggtttgtactccaggctaataagaaatactgggcactctgttctatctccttgggaagtgatcaaagcctctagaggaagctgggttgaatgcagggagaagccagcactcatttgtcctataacactggcatgtagctaaacctgggctaaagcccacattctaaaggtgatacttctaatacggaaaagtagcaccttagataagaagtattaggtttaattattttccccatgctatttcagggatgaataatctaaggcacagaaaattttaataatgtgcttctatccaagtgaatgctctcctatacacacattttaacatcctactatttcaattacctgtggtcaaccacagcctggtggacacttcctaagtattgaatgacattcccttctgagtagcatggtaagatctctgaccattccttactatcctgtcagagacatgaaccatctcattgtccagggtgtccacaatgcatgtatatacctgcccctctgatgtcaggttttcctttcaaggtattgcaaaacctgtgctccagtgttccttactttatttcataatggccccagttgtgaatgttgtcatgttggcaatttttctacagtgtgtttttgtaacttgtattataattgttagttagtcctattaatctcttactgtgtctaaactataaagtaaatgttatcataggcaagtaggtatggaatgtagaaaaagtcatgatgtgcagaattgtatactagctgtagttcttcatgctttctggaggtcctggaccagacctcctgtaggtaaagaaggtagttctatatgataagcagagtttgaactcagtctgtctgcctttagtgtctgggtttcttttctgggccattgtatcttctgaacttagagatgctattagcatcttagggatgctcttcagccactgaagacattcaagcttctctatttcctctgcacatcttttggttcaggcccagtggtgagctgtacgttgttcctattacacttgaggaatctttattttcagtcctgatgatattacagagctagtctcaagtatgatcccatttgtactggctagttttgtgtcaacttgacacagctggagttatcacagaaaaaggagcttcagttgaggaaatgcctccatgagatccaactgtaaggcattttctcaattagtgatcaagggagaaaggccccttgtgggttgtgccatctctgggctggtagtcttggttctataagagagcaggctgagcaagccaggggaaggaagccagtaaggaacatccctccatggcctctgcaccagctcctgcttcctgacctgcttgagttccagtcctgacttcctttggtgatgaacagcagtgtggaagtgtaagctgtataaaccctttcctccccaacttgcttcttggtcatgatgtttgtgcaggaatagaaaccctcactaagacaccattaaaaacatcagctaggtcagcacacactttggtgtcatgatgatcaactggacagtggagctatgacctgtttgagtggatgtgtagtacaagtactgtagtattcatggctgtctctaaacctttagcctctgctaaggtttttgccaccagactcagacaggcacttaagagctattgaaaagactttggcgccttgctaggtgtgggtaggataggtcacatgtttctcaccaggacaatgagtctacatgtcatgaacactcagaagaagggcttcagacttgtctcttgggggagcttatttaaagagatagcacttaaatagcactgagctgcacaaaggggtagacatacaaatgcttgggggtgaggaattgaggagagagacagagggcattcctaagaacccagtagtgagagacagttctgtagaggtcaacaggagccaacctaatccatgcaagagcatttatatcaagcagcggagccctgaagacttgaagctgggggggtggaatcctacttctaactctgttctggacactgcacatgttttttttttttaattaaccaatctgatttatgtatcaataatatcacaatttacaagatgccaatacaatcatttcagagccaattgataatgataaaagctttatcccaatatttctaatcttatgaagtcatgactacttggggctggaaaacaccactctggtacaggtcagcagccatcttgcttcccctttttttttttccattttttnnnnnnnnnnnnnnnnnnnnaatggcctttctctacacaaagaataaacaggctgagaaagaaattagggaaacaacacccttctcaatagtcacaaataatataaaatatctcggcgtgactctaactaaggaagtaaaagatctgtatgataaaaacttcaagtctctgaagaaagaaattaaagacgatctcagaagatggaaagatctcccatgctcatggattggcaggatcaacattgtaaaaatggctatcttgccaaaagcaatctacagattcaatgcaatccccatcaaaattccaactcaattcttcaacgaattagaaggagcaatttgcaaattcatctggaataacaaaaaacctaggatagcaaaaactcttctcaaggataaaataacctctggtggaatcaccatgcctgacctaaagctttactacagggcaattgtgataaaaactgcatggtactggtatagagaaagacaagtagaccaatggaatagaattgaagacccagaaatgaacccacacacctatggtcacttgatcttcgacaagggagccaaaaccatccagtggaagaaagacagcattttcaacaattggtgctggcacaactggttgttatcatgtagaagaatgcgaatcgatccatacttatctccttgtactaaggtcaaatctaagtggatcaaggaacttcacataaaaccagagacactgaaacttatagaggagaaagtggggaaaagccttgaagatatgggtacaggggaataattcctgaacagaacagcaatggcttgctctgtaagatcgagaattgacaaatgggacctaatgaaactccaaagtttctgcaaggcaaaagacaccgtcaataagacaaaaagaccaccaacagattgggaaaggatctttacctatcctaaatcagataggggactaatatccaacatatgcacatgttttttaagaattctttttaccctgggatcacctctgaggaaagacatggcaaagagaagtgaatgctttctgtgtcttcagctccagcttgcagggaatgagtatataacctatnnnnnnnnnnnnnnnnnnnnnnnnnnnnnnnnnnnnnnnnnnnnnnnnnnnnnnnnnnnnnnnnnnnnnnnnnnnnnnnnnnnnnnnnnnnnnnnnnnnnnnnnnnnnnnnnnnnnnnnnnnnnnnnnnnnnnnnnnnnnnnagagagagagagagagagagagagagagagagagaagacaaaggaaatcgtgggcaggggaatgcggcagaggagcggggaccagccatcctgcagcctcagctaccagccagaggcatacacagagtggtttagcccaaagcctgtttgtaggaggatgatatctggagctaaatatacatcgataggtatttttagagggtttctgtaagaaggctgccctaacatgtgtttccctagcagctaaagatcgaggaaagcaccgttttcctctgggagccctgtctttctggtgctgaaaatgtgggggaggtgttgcttatgcagccccaggggcccccagcccgattcaaatccccgcagtaatagcgtgatagccctgggtatttatatagcaaatcatgtcagggagcctcctgggatcttagcgactcgtcttttacgcacccttttagttgtgggtgggccaaagccagaagtgggagaaagaaaggctgggtagagggaggaggcagggagcttataattttgtagatgggaatctgacactgagagaggagacatgaggggttttgcgtttcccagcttcggtgaaacaggagcttaggaacctggtgtccttagtactgctggtggggaggtctgtgagttcttggcctccactgcttttgaaattcttccctggagcagagctgggagctgcttctatggcaggtctcctcctcttccctggcactatgttcagtgctccacactgggggaacactacagttactggcccatgcagcagctacttttatcagaacagtattttgttccagttgtatgatgggagagatatggttcagatgcagatttttgcttgttattctttatttttagaatgaagaggttcattcaggggaagaggtaggctacatattaaacttaaaggtcttttctgaattctgtacattcagggaggctccaaatgagaatgccagttagaacttaacagactatacataggttcagtaggcaaatttttctcatgcataactgtctttttttttttttctgatgagatacatcactagtccactgaacagatatttactgagcaccatctgtattccatgtgcaaagttttggtgttaaatttcttttctcaaaaggctttttcttgtccccattggtggaagtgtagtcaagaatttagcttatggtgtcagccaagaagaggctaaagcagaggaggtaggggacgcttggtgatactgaggacatttggtctggggcttttcttcttggatttatgttgatgaagggtgatttggagacagaaacagtgtccaatgcattctctgaagaccactcccagccctgtgccattcacttcctgggcatgaatatgtgagtgatggagtgaggggcagtgaaagtagagatgtgctggcatagtagagggtataaggtatgacctcattctatagactccgaatacagagtaaacattagagggggtgttcgtgtttccactctgtggataaaatacgtctcctcccttaagtagacattgtaactcctgtctgtgttgtaaatatagtccacagttaagtataaatgcatcagcgtgaaatgttaggacacgaggcactgtttaatgtcagtgaagtcaggcagtattgcatgtgctggttatggagcagcttcgaaagggaagggtgagttgagacagcctagatttcagaagacaaaaagtgggtgggctggtgtaatggagagtcaataaaagcaagggaaggccaagttactcagccacagtcactgcactttatatccgggagaatgttaaatttgtccaactttttcacggaagagaaaactgatgtacaactggctaagtgctttgtctaggctcttcaaagtagaatgtatgagccagggtgtggagggtagtttgttcagtacaaaccaagagctttgagcattgtaagtcaaaggattataactaagaatattcaaaaggccgtgtttcagaatagccaacccctcttgcttatacttgtaactgaagagaacagtttcactgaaactattgcaaattctgataccatggctgttaaaagtttcttttattatcattttgtgccaagacaaaattgaacaataggttagctctcatttctttttagtagtatatctaattttatcaacactgggaaagtcctccatagctattattagcatgaacaacaaagaaattccaagagtaaaagttgaaatggaggcttccatttttaattttattaacaatgaggattttgcctcctctagagccccatttttccagtcttcctattcctttgtcttctggctcccttccccccacttctcatcaagcccttacaggtcagaggggccccacagaggaaggagaagacaagcctgctttgtccagtcagcccttgcagagaaaggagctaagttcctatttcctccttgtctttctttcaattcctaccttcacgactgccactctcctgtcagctgcctgagccttggtgacaggatagctagggaaggggttcaaggccatggcttttctccatctgtgcagatctgggacagtgactctgagccagaatgacaggtgcgacgacttcacacttcagttcccatcagccatgccttcgcagtaatttacatcacttcggcagggacatcccgcaccatgaccctccagagctcagccagacctttgtagtcattcctaacctcatagccacttgactggacatggagagctgcagctaaaactgtcatggcttggggtgactttgctgttgagtgagaggagacaaccagaatgatgtccctctgtgacctcacctactgaggcttaagcctaatcgacacccatttttagacttttgaacaagaagagaaaggtgactttcaagagtttggaggggaggtgaccaatcccatactcaaacagagaggggactgctagagattcaggactggacagagatagtttttattgtctttgagtttgctgtctagaggagaaaagagatggacttttaaactgaagcacagaggtatactgagtaagcagagagaagtgttagagctctgggaccctggaccaaaactgaaggaaggaggatcaaggaaatgatgatggtcttgagactgagacagtggaaggggaaggaggggaagcgtgaggagagctttaggcagaggggagggcacctatgcaggactggacacagggcacaccaagcaccactgggaaagaataagattgctagggtacttgtggtgacagtgacctagaggaagaaaggaatgttttatgggaagccaccaaggggctctaactaggatggtgaacagagcatcaggcaggggtgctattctctgggaagagattaatatcacattgaatgattccatgtctactcagaataggaacttggaactaagtcccaaagaatgcctttcctcccccttgtctcctccttccaactttggccctcaactataattttgtttcactaactgaagttgtaccaaaacccatcctagagcatacaatctagcctattgcattctgaagacttgttaacctgcccagagtggagatttagttcctgccctcttaagatcatgctttgagcatctcctactgattcaaataatgggtaagaattgatgaatgtgtgggcttttattttcggcattcaacagcgaaattattttaaaaatgctttgctgagaacattgctatatgatgattatgattttttattttccaaatagaacaatagtcaaaagatcaagccagcccacatgcttgtttacgggatgtttctcttctctctgctccttccccatgacacatcatgatgctgaatctggatcctaattgaactcttgttaataaccacgataaatataacatgttgtgatctaggggttctttgtggggaactcagagtgctttgtaatttacctcctccccactttccattagagaattggagacagaacctacccattccctttctaagtatgatgttattatatagcagacctcccagttgtgtccttctagtcgactgtgaggatagacacaggaacagttaaattctcactctgtttttttctgctgaccacttatatttcatagcctctttttttccaggagtatattcaactggcttgctctctctctctctctctctctctctctctctctctctctctctctctctctctctctctctattgaattaacttggatatttgagtccttcagtaagttaagtatctcaaatagaagaaattcggacaaggttcttcctcatacagagactctgatcagaccagggtttaaccactaaggtttaaccaggtggttctagaaataaaagagggaggggcttctgtggtttcagcttccccaagcaattaccaggctgaaaccacacagaagccaaacagtaacacatttccctgggatacaaattttacaaccatcgtcatgtaaacttaaagcagaattggatctcagggttcaccagtcattccagtagtgttcaacatgggggccccgggactctgggaactcctggaattattgtaatggatgagcaaatctgtggtcccatctagaactggctgttctcagatgttttctacatgtaggtatcatagtatagtttttatagagtgtgtgcatggtgttgtgatttatagatacagatacatttaaatgtattgttattgaatagtggctttttcttctctttggtgagtcagcaaagcatagtgattaacaactgggtaacaatgggtaagtaaatccatgttcatacactatgctgtttgctacctgtttgactgtgggcatccagcctattttctgtatggctaggtgtccttacccatactaaacagagttgggtgaatagggattatgagtcattgatatcagttctctagggaatggagtgggacttgaacttgttgaaattacaaagaggttctttcacttgtaagataagaattgctaaaccattgtaattaagtgtgctgctcaacattggctgtcaataagatctgtatttattgaggaggcatacgcttacctgtgagaaattatcttgataacattaattgaagtagaaagacccaacataaatgtggacagcactctttcttggacttgggtcctagactgcataacaaggacaaagggagctaagcatgggcagttatcgtctatctggttcctgtctgtggatacagtgtgactagctgcttcaagctcctgccactgtgacttggccaccatgatagactagaccctcctcaaactacaagccaaagcaaacccttccttaagtttcttttgtttagggtaattttaacacagagatagaaaactaatgaagggaccaactcactgttacagaaaaagggcataaacagcactctcaattatgtttagttggaaggtcacttgcccacagctgaaggtggatgctagtgttcagtcttgtgtagatgtgggtgggagaagtggaagttggacatagctcttacactcttgaatagagcaatttgactagagcagagtgtatggctgggatagtcacatctgaagccaggcctgaacccagttttatgtggggcagtctaatctttaagaatgagaagaaggaaagaatgtcagttgaactgtaacacccagataactgcctgaagtcacatcttttataatcagcctgcatatcaatttctttcactattggctagaaatgggtccttggatagttttgttttattggccccttgcctatctttcttcttttcatatagttttagtgccataaaagaatatatctttttttgaagacttcagtttgaacataaatgttgaattggttactatttgagagaagagagcaatgtgagaggtgtttttttttttttttttgagatgcatttctgtttcctgaaactcaccaatgcaaatttatagattcgttacaagctgagagacttcacaggggaatataaaccaggcaagaaggtgtaatccagtctgtgaagttctcactgtccctggctcttattgcaggagtgtggtggaatgggggaggggtggaatagaaagctggtgttcttttaccagatttctttatttttcttttattgtgtgataatatgaaacatgcgtataatgtgttttgattaaatttacctcccattctgttccctcagatttcttccctatttccctgatacttctgctctcaatctcctgagctcttcttcaccctcccgagtctacttggtgccacctctatgtccatcggtttagggccatcgagtcaaacatgagtagcttctcaaggactgtatccctgaaccagctttcttagtaacactgcttttctgtccttcccatccgtcttccctctttctgtccatctaacaaattgtcatgtattaagtgcctactgaatgccaggcattatcatggaccctgcctacttgaaacttactgttaatccaggtcatagagacatttagaagacatgggattgcctggtctgcacttggtagtaaatgaaaatagtgatctcatagctctctcagcaacactagattaccttgatggtatagcccattcacaagactaaagactttgatgttgacagatctagcttgaacttcagctttgatactgagatgtctttttggccaagttgcttaacttacttgaatctatgatgttaaacacataaatatttttttcttgtaggagtcatgttctaggttgagcagggttaaacgttctaaaaataacctctcaaattttataggttagcataataggtttatctcttgctccttaaacagacaaatatgttaatagttcacttttttcccctctatttactgatttagagaccaaggccctaacctaggattctaccatctgccaggtctcatgatatttatgtggagtcagaaagagaatatgaattgtttcatatataagtggtgtacataatttctcttagcatcctattgacaagaattacaggtttatcgaaacaaaacaagaagatcctgtcctaattgggtagctacctctaggcaacaatactgcactgttgaaaggagaaaaggggaatacctgtttaggatccttttcaaaagacaagtgataactgttccattgtctgcatgcgggttagataaaatgcatgtgctgtcagacatatatgagatatataacaattttctattgattattagtaacactattaaataaatactgtacatgcatataactcagttgttaagaactgaggctaaaatggtaatgagatgcatgacttcaaagagctctcacatggctgtagtgtatgtttgtgtttgtaaatttttttttacctttggtatgggcgtttattttattttattttattttattaagtattttatttatttatactccagccattcccctttctgcccctccccacagttcctcaccccattcttcctctcccttgcctttgagagggtgctccccctctacccccgtaccccaagagtgtcccccttccctggaattctttctaggattaggtgcatcttctcccacagaggccagaccaggcagtcctctgctatacatgtgccaggggcctcagtccagacctggttgatggctcagtctctgggatctatcaggggtctgggttagttgagactgatggtcttcctgaggggtcaccttccccttcagctccttcaatcctttccctaattcctccctaggagtccttgatttcagtccagtggttgtgtgtaagtatatgtttctgtcttagtcagcttcttgttgggcctctcaaagggcagacatgcagggcttttgtctgtaaagacatcatagtaatagtgtcaggtcttggtgcacccctcaaccgggagatagatcccaagttggaccagtcactgaacagcctttcctttagtttcttctccatttttgtccctgcagttcttttagatgtgaacaattctgggtcatgtttgtaaatatttaaatgtataattataatgtgaggctattacattaattctgaagaaaaggccagggaaataaattttgttgcatttgggtctcactacaaacctttcgttgaatgcttgctgtatacatggcccagtaatatgcagcaagaacaataacagagttcagataggaggcggtacagatatgggaatttggtttccttctcctcaaaggcattaactattgatacttggtaggtacaagtgtaagaagccatcaaatcattttattccctcttagtgagacttgcaatggtaagaatgagaaccagtttgtcttgttttatgtttattctccctcccctccgggatcacagagaccagcagtagttagccaactgaggttggtgatgactttctaagttggcctagataaccctgctggttaagacctgtcagactctgaaccagctgacccacttattcatgtcttttctattgttagtttgtaccaagacgtgttaacgtttagttatggggtgagtgtagctacaataaatagagtagatacagaagcaaataaaggttaccataggtctttggagaaagaattattgtggcaatagccctaaaataggcctttggggtgtcaatttcaattatggctttccattgtgggcagtcttctatatagggtcttataactggaccagtaagagctgctcctatcaaaacagtttaaattaattaaccaactagttaattaatgtgaatgcatacactaacatgcatacaatacatgcctctttttttaagtgattattttatgccagttgtggtggtacatacttttaaactcagaactcaagaggcagaagcagacaggtctctgtgagttggaggctagctggtctacaaagcaagttctaggacatccgagggccattacacagagaatccctgtcttcagggaaaaagttgttattattattattattattattattattattattattattttgtgaattggtattttacttgcatgtatgtctatgtactacttttgtgcccagtgcccatggaagttagaagaagacattagaatatcccctagaactggagttggtgagctgccagagaattgaacccaaatcttctagaagagcagccagcactaatccatcttttgaaccccacaaatgcatgtcatagcaggtgtttggcagttaggggacaacttgcaagacttagctatctcttttgcaatgtgggtcctggacaccaaactcaagtactcagacttggtggtagttaccttcacctgtcaagccatctcattgacttcctgttactttttaattgcttttgtgttgagttttccttgtttggaagaatttaacacaataatgttttcttataattaatggtttatattcttcattttgtatgtttgctacttattaggccatacatcttactttatgttaatttttctcaattgatcagagtgttttaaattgatatttcatacttatcaatcagtttattaaattctcaatggagactcctttataacctacaggcatggatacacagagaacactatgtttagtattagatttattgatgtttctcatttatacagagttaataataacagtcaaatacactcaattctaattagaaataaaataatttgttgcagtcaaaaacctacccaaacaaaaatgaataaaatcttggtagtgatcttcgttggtggtataaccactgggctagttgagttcctgagtcttaattttaggagagatactaacctacaaaaggctaagatttgatggacggacatacttgaaatcatctggttccttcattgttgctggtaccacgccctgtcaatctttctcttcttctattattcaccaaaagtcactagaatgctttgtggtgttatctgtattctgatcccagtgttacagagtagggaacccattaaaacttgacggtgctcctgaaagcagctgtcctggagggaaagagacggaacgaaagagatggaacgaataagaaataagagtgttaagaaactttgtagctcttgaagttagacacagggtctaggtatgtgcccttatatgggttatcttttatcagaccatatctccatctatgtttcatgtgtgtccttcatatatcttgtcctgaggagagtcttgaatgcaaacagcatggcagagatgtttccccacagagtttgctctttatcagtgattttgttggaaggatttgcaagcttattccttactttgaaaagagcatcgcttgcttctccaaattgccccaggcctaggttctacttcctttctataagctgctctggggaccttcccctttcttcctgcttcattaacatccctaacctctgaccctgacccattggtctattctttgtggggaggtccagtcctgggatccccagctcttcagcctggcagacaaagcctggtcttagattgatgtttgaaactgaatttaccttaggaaagtcaagagacttaaaccttgttttactaataattctaacctgctgtttgtaggcagactcacgtctctataggcaaaatgggaatttgtttgtgttcatataagggggaagtgaggaaggaaagcctagccaatgaattttgaaagataaccctcccctccacatagagagtaaaagcaaactgagatattaaaagactataaataggttgtatttgtctctttatagagacatcctaggactatacatgcgcattcaagtgtacgcacatattctcttccccatctcccttctcatccccccactcacacagaaattggatctttaattttttctacactttgattttttcctattgagtacgatcttctttttacacagtcctttccaacactgtcatttctatcagtagaatagatagtctctgtggttaggtatcgggaagagactttgaagtgggtccctgatgccaggattatcaccggccctgcctgggtctacttaggttccctgactgaatgcaccttattcactctaacttgaaaagactagagagggagactttagagagtcatgagcttgccagcatggtactgaacatttgtatgtggaaacattttccccgtaggggtaggaacaatagattttcaccaaatgagcctcagacccacacggtaggaccattctattaaatcacctcccaggctctgtgagcttaagaatttgtctggctttttaccctcctgtcatccagccttttctggtttgtttgatggctttgtcaatgctcagctacagaggactacagatatttttcttttctctttgttgtacattgatattatagtgagaacactagaccacaggccccagaaattcaacggatgactagggatgatatgtttttctaccattacttttccatttgatttttagggtgagtgttagaccagattttttgggagttctaagagtctttggtggctgaggtcttaagctacaatgtgatcaccatcaatggacccagttcctgagacatcgcagtaacttgacctctaatgtcaaacttctcctttctctggttcattatcacattcttggttgagtaacttccttttggcaagattctctttcctctttgaaacggcaagaaaaagtccatattttgaggtatcagagacttcaacaactgactgttttcttcttgttttgatgttcattgcccacctgtcttatctctggaaccaggacttcttcaaccaagcaagactggattcttttgtttctgccctgtctcaaatagtttttctctgttgctttacctgcaattacacttttcttttagaattattattattattattattattattattgcctttagcaggtccattctatgatgttctgtcttgtaaaagacaaggttcattagagaaatagccttctgttgtgtacctgacatctatataaccttttcttcatagactacctagcattgcctttcttcctgtgatatttctgtggggcctcttatttctttactgaggctgacagttggggttatgttccctttttcatgctctccaaggtatttgtagtctcatacccataataaatgctaaacaaattcaaattcagtgtaagagttcaaagccaggtctgtgcatcctgcccatgagtctaagggcagtcttattccaggtccacccatggtctacttaggctagattctgttgtctttatcctgtatttttcactactgcaaccacaaagcaggatcctagaccttgaccaagtctagggccattcagattgaatgtgtacctgctgagctcacagtcttgctaagagttctggggctaaaggaacaggatagagtgtcacagaatgtgtccttgatcaaaacttgggagagaacagcatgatcctccccttatgtttctgaggcaatctctgttacttacccaactaactcagtagaggctattttcttgccgtgtgtcatcactgtgttgtttaaaataaatgacatcttggtactatcagttgtttgcagtgtggattctttcttcttcaatcaatctctcttcccacttgcctgcccccatctcttcctggacaattagcaaagtgtttggtgtttggtttggatgaataattaattcggaagctttgtgaatgattcatggcccatatgctggggcaacaggatgtggtgtctgtgtgtttgtgtgtgtgtttgtgtgtgtgtttttgtgtgtgtgtatgtgtgtgtgtgtgacacagcataggcaggtcagaggcctctccttaggtcggtggccctaggctatgtgtaccaccccagtggcagaataggttgcatgtaatcttccgtttggagattcttcagggaaaaaaaaacaaacaaacggttctccatggttttatgtattttaattctagactggtgttcctagtttgggccatggtacttaatgaattggagtttatatttttaaaagtagctattgactgtcattaagatgggtgactgattttacatgtcaaagctttaaagggaaagaaatctctttatttccttgcataaagcctcctaggcaaggggcaatgctttcttcagattgtagccttcttactccttgcgactatactacttttgtttcctggtacagctccttcctggcagggagaacacctggctacagttcactttgtaggctttcctttgcctttgaagcgtgttcttatttacttaagtgcatgataatatggggctgatgcctgggctataaacacgtgacttctctttctgccttggtcattttgagtagtgactcctgaatatgtcctgatccctgaaagccaacaaaggagaaataaatgtgttacataaaatcctgaactgagttcattgtctcatagacatacagactccacatttcattatatatcagtaaaatagagagagtctgggagtaaaatccaaaactctggtaagatatgatccaggttttggtaatttctttttcagaagagtaatgaaagcatttttttttctgtagtccctagtatattctaaggttgtgttaatcatatttttgccccccatttctatagaacttatttgtatgtgaggtgtgaaatttgactatacctatatttcccccgttgtttctcagttccgtttacaacgggtcatgtcttccccactgatttaattctacttttgtttgtatactaatttcccaaatacacactctatctttaagttctgccttctactccattggctatttatttgtagactgtattttttttgtactgcttttttaattagtagagctaatctcgaatttttctttaaaattgggtgatcctgggctttatggttttatatgaactcagagttgatgtgtcaaaagtcctaagcttttgttggaaattccgtgggtttcttgactagaatgggaggtattgacattttaacaatgccaaatgttagcaccatgtcttctttatttaaaacattttaggtcctatgacagtatgagggagatttccattcataacctgttgctctcatattacctattttgtgtctaattctgctgctgtgaagaatgcatttttgtgtgtgtttctattcaaatgttgctggtatgcatataaatattattgtttcttatttgttgatattgtattcatagatctcataaaattcttttattagttaaaataagtctataaattctcttaaattgcccatgtaacaaattataacaacaacaaacaactattattgctttctaattggcctatttatatttttcttactgcactagctataggtgccaggagacgttgaataatggcagtgagcaaccatttcatatttcctcttctttcaggcttttcattgatggatgtctcttggagaatgaaaatgagtaacttttataaagggcataaggaataacagtcaatgagttttaataatagctcagtgttttaatttaattaaactaaaagggcattgattttatcctgtaaatgattaaacattgaacttattaaagccattggaaaaagattcagttaaagtttaacaaaaatttcatttatttttgcagtgagcatgtgcataggatttgggtggaatgtgctgtgattgtataaacaaaggtttttacttgggaaatttatggagcaatagtatgtagaatgagtcatgatgagaatataactgataattatggctaagaaagtgggatatcgcacaagttgaagtagatgctgcaggcaaatagcaacagtaaagaaaaaaataggaaagttcagcaaacccattaaaaatcaagaagggagagaaaaaaagaagcaattggaaaataaggagacttgaagacagagtagaagtgactcctgaccaatggcaaccagaactaatataaacagacagaactaatgtaaacagaccctatcaatagaaatacccaaaatgcacaaaatgtcattggaggatggaaaacagagtgggtggaagaagataggctgtataatgtcaacatgaggacgtgactagtgatatagtggttaaaaacaggaaggtgagagtatcagggatacatggcaactggctcatcagtccagatgatttaaaacttatgtacactcagaataatatctgctggaataagggagctttctagttgggtttgaagaagagttgaccaaagtttagaatgtatgcaaattatcactattttagacagggcagtagaaccttggtggttctaacagttagacaactagactgataatgaacagcaagagaagggaggtgttggataatcctttgctttcttggtcttttcagcctttcagaagacttgcagatctgaatctgtgtgtagagaagatactggaatttcagatggaatttaagtttgtccaagtatacatgtatttctcttttgactatatatataataaaatatacacatgtgcatatattatataccgtatatacacgtgtacatatatgtatatatcatatatatcatttacatatcatgtatacgtgtacatgtatgtacagatgtatatatattacattcacatattaccttcacatacacatactgaataatatttgcaacacacacacacacacacacacatacacacacacgatcacagatgggattcctttaagaaaatgttaatttctctaggttttctttagttgttttgtttcctttttttaaaaaaatcttttgtggatgacaacacttctaattattgttccatctcagaggacttctcttccctccctctggaaactgtagtgtgctgtgctttcttcatgcttcttctgttcttgagtttcactaatctgtgccttatgtggtgatttttatttttattctccatggcattttagggggaggacagccctttccttctgaaggttaatagcttcagtaagggctatgagtactttggaatgttgcatccactctccaagttttttgccctttattccatatgtgtgtgtgtgtgtgtgtgtgtgtgtgtgtgtgtgtgtgtgtgtgtgtgtgtgtgtgtatttgttctgcatttctagcttcatttggctggcctgtaactcttcataaatcctttaaacagccttttttcttgtacttttcatttttttatggctttgtatgggttctggaattttgttcagttctgtctctttgtgtctagttcagctgtctatttggccattcagcctgtttgatggatattagcatttccagtggttgtaagtttcttttgcactgtctctggatgtttgttcaaaatgctgtgatatccccatgctgtcatttaggctattcatcatatgcatataccgtgaagctcaagttgtttaatgaacaattttgcttttttctctttgtttgggtatttgctaagtcttgagtatattgccagcgtctacctgcctgtcacagctgtgtaaactgcttaaagggaggaagactgtaaatccaatattgtagcactactgcaaaagtgcaggggcccctggcagttggctcactccactgtccagtcatgtgggaagacactgctgttcctcccaggcacaggtagatacaatgaatgcttctcctctcccactagccatgcctgtttctccagtccaatgggcacgtttccccttgctcttccctggtcgaatgtgggaagaatgataggaagcagagccaggagtaatttcaattgtgtaacatttctgctaccaaacccaaactgtcctgttggtcacacttggatgaccactgcctgcagacaagagcactcctggtaaagtgcccttgttgagagctgtcacactctttttgagtttggaggccccagtttgttattttgttttgagctagaatcttgctatacagctctggacggctgggaatttgctgtgtaaaccaggctgtcctcaagcttggagcaatctttctgccttaacctcctgaagtctgagagtactgaaacgtttgtttcttttcaaaaatcccactgaattcactttctgtcctgatgggtctatcagagcctgcagattccgttgccttcttgatctccattggagtttttatgtgtgagaatgaaaggtgttctaaaaatttgttagaggaggaagtcatagtaggtgctcttatgtgcttatctgagaaagaggttagtgtcatttctatttcttttcttatttagtttcaattacatgcgtatgcccatgcatgtgcgcattcatgcgtgtggtgccctgctctatcactatccactttacattcttgtgacagggtctctcattgaacctgaagctcaccctttttcagccagactgtctacccagtgggcatgggcatccagcagtctacaacctaactacagtgtggggattgcagtgttacaagtgtgtgctcatgtctggcttttacatgcgttctggggcatcaaacaggtcctcatgcttgtgcagtgagccttgcatattgaaacctctccctagtctggccttcccttttcttacggttggaatgagaggatgatgatgagggtggtgatggcaatggtgacatccagcctgtgtttttacgttaagtactgtccctatatttccctactgttcacatgattcctcagtctccatgacatagattttattactgtggccatttcatagatgaaggaactgaggtacagaaagataggatgatttactcagataagtgtctaaactaacttgcattcgtttgaagatgtttgagctgacacatgtcaagcacttgccatggtagtaagattacaaaaaatggcaactttcattttcctaagagccaacagcagagatggctgataagagacgctaataaataactcaagaatgaacagagagctagcacaaagttctatttcactgattccaaagaagatcctatggatgcggttactaggagaccatcctaccagattgttgttgtgtatgataaaataactgtgggtttagggaagggcagagcttgattcatactccaccagatgaacatcttacagttttagctattgaattcatgctgcttgaaactattttaatttttttcagatttgtcatatgattgtcatatgatatgattataaataaactagtttgtaggtttaaagaaaggcaatgattttgatctctcatatgcagaatactgaaaaaagatgttaagttctactccaagggagcttaagtgttactttctacacacagtcaatcctctggctagcttcagcgacttgtattgtagctcttgaattttgtgctatttcatgtcctttgaacatgcttctttgtctattgttacaccatcctgaccaactctcttgactatcatctcttcagctgactatgactgccttcttctcatgtccctccaccttcctcctttgcttaggctgcctctcaacttcacccttatagttggtgggagtgtcctctactgtccccaggtttctcattgtgggtttgagggcagcggtgatatccttgtgtgcctggtgcttagtaatgagtcagcaaacatgagtcaatgaacagatgaaaaactgagtaagctaatgcacagattaaagggtgacaggtgtaaaaggaagtatgaattttggaaggcaggaaaactattccaatgatgtttttaaagctaagtgagaaaatgccatgttcactcaatcttggtccagtatcactgtcatgggaagaagtttctattactactcatctgtctcccttctattaccatgctataatgttactgatgctgtatgtgaatccctcaactccagttgcccttccatttctgagtcccattagaacattccataattgtaaaagcaacttgggaaaatttgataagactttctttttctcacttaataaaaaccctttcttagaacagtaacttttgaatgttaggtataaggctactacattacttcatagataagatctctgttagaatctactcttttctccattagaagacagatcgagagtcaagactttattttcaatctccacatataaaaatgatatacgcaatcacatgtattccgtgccttgagttaaaaataggataaaagcaaagtctgactccaggtcttccatgttttaacatacaaaaatgtcatgttagtctatcttctgtctctgcccacttcttcgtcactctggataggtgctgcgtgaacacctcctctccgggtgctatgtcttgtgtgctgctagcacaatgaacaggtagaggcttcagaatgcttatcacaagggagatgtgagatcagtgcaaaatttacattaacgtaggtatcctaatagctccattatgtggaggggggcagaatagtctcatacatgctcagcataaacatcataggtctgttgctgcctcaccaatagtctatcctgcatcattatctcaaacatcatagtgtaaaggtttattcccccatgttaccattataaattgtgatctatggtgaaactgaatgtatatagctttatatacattatatatatatatatatatatacatacatatatatggcagcttttatttctcgtttgcctgagagctgagagtagtccctttgtaatgctcaatgagaattgatcatgccagtgaatgaagaattgaatggaagatattaaagggtggaacattggaaagatataggactcaaaatatgatatctccacgtatggcctcaatatactgactatgttaagttgagggaatctgaggatcagtgtgtgtgtgaaggacttagtgagcatcctctgaagcaggtcatacagctctggtgttagatgtcccccaaaccccaccccgggaaaggagaattcttatccccaaagatggtggctccttgtagaatctgaatgaacagaccttgaaaagcttcccatggctcattgcacttagctctttatctttcagttctgtcatcttcccctatgacattctgtgacattctactcctcatcaaacttagaacacaaatacccaacagagtcatttcttggggcatttgaaaaataaaattcttgtcacataaaacttacattaataatcaaagatttgtgttttctacttgattgcttatcttctcttgtagaactctggagtagaactagatggtgggctctcacattgacaaaaaggatgctattgagggtctaagagtcctaagattcaatagagttttaggcaaaaatattatgtttttctctctggaatattggccagtctattgccatagttgttcagaaaacatgtccctgacaacaaggtgggcaagttcaagtagcagagttggatagctagaagaatggtgagctgtgaggtccccttattaggtagggagacaggacagaaggaaagggaagggcaggcttctgggttagtggtagcaacattgccgagaagacaagcagaagcaaattgatgctcagctcccagattagttaagaacagcctaattagctaatgaacaactccagccctgaaaagctctgttatggggtgagctacaattctcagcagcatctgcagagtgtgtagacgtgctaacacagagctgaggaacacatgctaagttctgacccacaaatggctggtctttttatgttacacttgcttaagggaatttcagagagccttgtcatcaatgcaacagagtacatgtgtgtgtgtgtgggggggtggggtgtgagggatgaggggtggtggaatggagaggtaagttcaagtcccagcttagttatatcctagcagagtagtctctacctccttgtgatcaagaaaacacatctgaagtgaggatgtgccttttttattgcagatatttattgtgcatactgataggtttcacacagtatattatgtattttggttgtacccatatcccttctttctgtcccccttccttcccttatcattcccattgtatgcatacctcttccctctgctttttctttcttctattattctcattgtgttcacctctctctctctctcttcctccctcccccctctctccccgtccctactctctcctattattctcattcatttcctcagagagttgtggttcctctctcatgtcctatgtagatggttgatttttacacatctctaggaaatctagaacccataaatccaataatgcttgtgcaatttgtttttctgaatctgactttgggactctttttaaaaagtgataaacatgttctgaagttagatagtggtgatggttgcacaagcctgtgaaaatagagaaaaaccactgaactgtaccaattggaagcatgaattttgtggttgcatatataacccaataaagctgttgtgaataaagagtgcatatagctcctaaattaggacagtagcaaatgcaaataagcaattacagtaacgctgtaaccctgtattcatctaaattgccacggacacattgcaaatggtagtggtggtgggctggtatacactggaagtgtagctatagatggccctttaactctcttctcttcctccttcctgtttgaagataacaaatgtttgttgctgccttcttgtagctctgtgtgagctgaggagatgggaaagctggtgaccctagatagattggtaattgcagagcacaaacccttcatcagctctgcagtccacagagggcagcatgtgacagacagcaatttaaagggccatcctttatagggtttagttggttgtttggtcctttgtgattgcttcttttgtattttaagaaggcttacagtcataagcagacttggtggctctaagcggctcttcaggctttatgtctaccaaaagtatctcgggtttttgtgaaaatgaaaatgttggccttaccacagacagttgggacttggtagttacccaggccgtcaggtaattctgatgcagatgcttcatggactatatttgggacctgagggagaaaaatcatcctgttatattgagaaatataagcatggggccaacctgaccaacttcaggacgtagctctccagaaaggaggagaagaaaactggggctagacagcctcacctgtctctgcagtgttaaaccttcttattgtttagtagccctgggactaaccacacttctcatgaaatttaggcccaagtcttctatttactttttattttgagacacaatcttccagttctcaggctagcctcaaactcatcctcaccatgtatgatttgtaattgtgatccacctgcctcagcctcctcaagcttttaacataggtttgaaagaaagatcagaaaatattaacccctgttaaatgcactactatatatatactgtcttttgtatacattaaagatatattggagctattgtatagtaacgagtatttggaaatctttgaggttttaggtgtaagaactctactaaagactagctgaggcagagaagcagttggtctgtttagggtactgtggtttccagtcaagctggggataatggcggtggtctaagaagactcgatggtcatggctctggccctgccactctagctctctcacaggcttatctcacatagactagctgtgattgcctctggctctgctcaagctgcccatgagagcaaaattcaagaagtggagaatccatcagctagactttcccctatgagaacagagaagagtaaggaagagcagggacagggaactgcagcctgcctattctgccccaggagacttttcctcgggggtttggatggatttcatatctggaccatggtagctgtcaattgcatccctatgcttgcctagcttctaagctcctctgttttgaggagagagtttttgtttcctagctcgctgctacctcatggccctcagcttgatcactttccttgttattccttcggccgtgtaccttccttggctccctctcccccagtgatggataaggagagcaaacaatccccgggggctgggggtgaactgaagactgagcatcacgtggccatcaggaggtgttagagatcacggagggactgcagaacaacgtgatgaccagcctcaactggagaaaaactgacttgatggaagaacggatcatgacagagggacatctgctatggctgacagttgtaaatgcagaatactcaacaagtaggcaaaggattggcttggaagggagtatgtgccaagtattcaagtttgaaagcagtcttgggctggctgggaagctggccagtgtgtgttatccttgagagagggcgttggtagagagatctcactctggcctgaggttggatgctctgggcttttgccagcatcttccttccttgaacctctgcctagctgtctgagaacaaggagtgcccttccctggccccacacatgctcacctcctgcattcctgttgcccttgggcttttcatgtggcctgcttcattatggccactgagattgcacctcctttctatgtcatgcctgctgtacaattctagatctgttcttttctatgcttggtgtgtttgaaattctacagtcacatggggaactctgcggatccccctctaggctagaggagaaggaggaattctcaatagacagctgctgaccatttatgttgttgaagaaaaaaaatcatctataatagataaccgctgctgcgcatgatccattgtgatagtcaccatcttcccatgttgtctctgattctttgtcacaagcactaggctttcagggcacaggttttgagcgtgagccctagaccattgtgcactctgggatttggacctcagtatcaatgtggggtcagcagtgttgaagtagaattagactcatcattttttctgcatttgttatagcatttgttatttcccaactcctgcctgtgtttttataattttatgtgtatgagtgttggcctgcatgtttgtatgtgcaccagatgcattgtctggtctcccgggaagctagaagaaggttttgtatattctgtaactggagttagagatgttgtaagccactgacatctggtgttggtaattaacccaggttatttacaagactagcaagtgctcttaacctctgagccatgtctatagccccacagtaggcactcttaaccctttagccatccccccaagcccctcacatctgcctaaaaaaagccacatgttttttctgtttgtctcttggctacctctatctcatgacttggatgttttcatggctttttggctttctgacatcacattctccccagtttcttctttataagaaatatcctggagccccatcttcagagagcccccatctcctaagatgtgaccctgaatgcctcttcatttcctagtccctagattctgtggtctctttgtggcctgtagtggcttcctcagcagtatgctgccctagatgtcaacttctaccccagaagctctagacacctgcctgcctctgcttgctcttgtacacactcattactccatcacattcctcccgatgacctgccatcctcatcacttgcttcttgtgcatttttccagtctttttttcccttttttggcatcaagagccacagttcatttgaactagagggaccttggagatcctttggtctgacttctctctggaccttcgagaggagatgacttgtttgttgtgagtacagcaggtctgtttaataccaggccttctttttgtagtgcatccctgcttccatcacaataggctacctaaaggtgataggaagtgatctcactctcatctaactaggatgatgtcatcaatagagacagagatgcagtggagatgagaaaccatgtttgtaggaggtttcttattcattgcttttgccatgcaattagcatcatattatagtctctactcatgcttactgtcacagccacagattgagccctttattgtatcatcctatggcaccaatttgtttgctatttcatgcaccaaagtaaaaactgtctcaatgacgtatcgcatagctccaggcagaggctagaaccaactgtatgcttaattcacagagtatcaagggcaagtctagaaagcctcacatttgagttactagatataataaagacctttccactcacagcagtgatagcttttcttaattgttgaactgaggcttcctagagtcccctagctagagtcacggacacgtcctccccttctgttttcacaatactttattagcatctttgtttttgctcagatagtgtgggtcattacgaacagactcctgcctcctcctggattttgagtttctggaggaaataaatagactttctttgtatggctcatgggagtctttggccatgaagtgtgtcatgttattttgctcaatatcaggtagctaaattggatgctctaagtattgacatagttaacttctaattcatatgtgttctgtctgcccatctcatagcctccttttacaatgtggccaaaccccagactgggactaaggccaggctgggagggtttgggatgatttccagatgggcagaggtagttgtgtatctgggcatgcctataaccacatctcaaagccaagtatacaatcaattaccttggtcttatccatcatatttagttggctaggctgcttcttccattagcccagataatgaagagatggcatttgtattgtttatgttgtggcacagaaaacaatgccccatctagataacaaggcatagtagccttttctgaatactcagatggaagtggtctggggaaaacaagcatgtctgagaggaacagaaacaaagagctagccagaacaaggaattagtgagaatgctggacatttggtttcttataagaatatagttttgttttaatctcaggtgtgagatatggggctacttcagattgtcctcagcagctgactctgatttgccttgagcgttagcagagccatggttttgccagctgcaggtcatttctttgattatgtgatgttaggagttgctggaatttttcagtgcatgtataaatgctagggcccagagaggtggggtgggttgttggtggtttgttgtttgattttgctcaaggtttgttaagtagccatgtgcaaagaagaaacaagaagacagtggatattctgatgataaagaacaaacttaccgcaactcaatggccctggtcaacagaaagtattctgatagaacatcacctgctctctgacaactaacttcgttcaggaatctctttcctctctcatctttatccctttttctctccaatttactactaggggtttaaagggtggaaaaggagtggagaatgttagaagaaagaacccaccaaatagctaaatccagctacaaggaattgatctgcattgatttcaagccccagggatcttacaaatctaactcatcttacagaattaagaaatggagccccccactaacatgagggttactgaactggattgagccaatggaaccaaagaggaaggggactgatacgagagacatttattgacatttaaccctagaggatggggggaagggggaatcaaagttgaacctcaggctggggggtgactccctatattgaggtgtgttaacattctggataaggagcagtctgaagtgtggagctttgaggatggttttggctctgtgagttcaatgtgctgtttgaaccattgggtagcactcttataggagcactggagtttaaggcaggggaccttggacttctgggatctatcattatatggtggctgttggaacagtagataggggctagattcttcctggattcctaggagagagagagatacagagagagagagagagagagagagagagagagagagagagagagagagagagagagagagagagagatgggaagagactggtgacctgagtcgaagccaacagtgcatgggcagatccaggtctctagcagggtggttgttggagaccattaaagggaaatgaaggaagacagagattctggaagaagaaaatggttctctgggtcaaaggaaatgtagaaaggctatgctggcaatcgcctgggaaaccccgatgtttcctattcttactctgtaagtgagtgctgttcctctgtggcagatagtaatgcaccaggagaggaattcttcctgctctgtgtcttagagtccacacgtaaaagtccctgctggctctgggctttagtcacgtggcatggaactagtcatccctgggcagtttgcagagagagggagagggggctgggtgtgagagattggtgtcttaattttagcaagacttttggagctccttggaaggcaagctttatttctacaaaaatagaaagtattattattactacatcttcgtgctgcattggagccaaatactggagtcctcaatactgtatttatttccctgggctttgggaagggtggaaaagaatgggacatttaggttgctaagtgacgtgcttctaaaaatattgagattccctagtggctccttctcctgttcttttggttggactaagaagatgataaggtcaagtaatagcctgaccctgtattgaggtgggcccaaggcatcttgttggggaagaatagaataaactctccctcttggaccctcctacctgcttccccttagggcctactactttgagaaatcacaggaaaaactgggcctccccctgcctgaatccaagagccttgcctaggcaggcagccctgatggttgccatggtgatagtgggtggttgggggaggcggtgatgcagcgtttggcctgtgcaactgaggtccccaatgtaggctgcctgaagcttaagctcctgatactcttggcgattcttctaggattccagagcgtcacttgctacagtgttgaaatcttcagaactgacaggcatctagacagccgaatcaatccttcattgtttaatatgtatctcatagacccataaacttgtgggattcggagctccacagagaccttggtaggggaaagtatatgcagaagagaactctgtgcaggggagaggggctaataccacagacctgagagtcgggggatgtatttaagagcttctaactcatcagcatccctgacaactggacactaagcccctgagttgacaatgattatgatatgaagttcattatagaacagaacagaacacactatttcattgttgaattagatttctctttttctctttggcaaaatctctcccttcctgacttgatccagcctctcaaaagccatgcagtaaacagagcacgaatgccgtcgtctaaatgatgtcaccaaacaaaacattcattcttttgttttttatgtatctttttgtgtgtatgtgtattcacatatgtggctatggaaacacatgtgctatggtgtgcctgtgtggggccagaggacaacctcagttgttggtcctcattgttggagataaggtctctgttggtatagcagcttagctggtccatgaccttctagggattcttctgtttctgccacacccatctcagtgtaggagtgctgggatcacaggcatgagtgatcatacctagctttactcgggttctgagggtctgaactcagatttccagttttgtgtggcaagtgctttggcccagcctccaaacataggtaacttttcatctgatgtcatctctcaatgccttgctatgtttctgccttcctgaatttcaacatagtttcttctcatacatcagtgtatgctgattatagtaatatcttgtgttatgacattttcatacatttgtatcacttgctttgatgataaccacacatagccattgaccttttgtctcagtattactttttaaaatgggacactctgaacagaacatacagctgtaactggtctgctcctctgtagagtagctcaggacagaaggcacaggattggtgaaaattctgagaatggtatgtccccaggccataccactgtcagacatgaaacctgtgggagtccttcccagatctgcatatggacaattgaccttgttctctacatttttcccatttaaactgttgataaaaattgctgagtgagaagaaacaacataatgatagaactgcctttatgaagtttgaatgtataacataatagcatcaacagctacatacacatacacactcacacacatatacatatgtacatacatacatatgtatatatacacatatatccttctatgtatttgcttttctgttcttgcatcccatctgcaatctggcaatcaaccactgttcttctgaggtggttgctgtcattacttcattaatgaagaagtggaatcacagagaagttgtgtccattgcccttgggcacgtgggttctagtagcaaagttggtatgttgcaattcagcgtttcatctactgatcaatagaatttggaaaagatgttttcaagtgacagaaactccacgtggtcctctctgccactgtgacagtaggatgtcggcgtgctttgctaatcaaccagtaccaaatgctgagcattgtcctgattgatctgcccagtaatcctattgaagcagtcagagagattccattggaccggttcatcctaaggagccttgggccagttcctgagaatggtaagtggtggctatgctgaggccttaccacacctgagctgctcttgtgctaagcactgagctaccattcctgtcctgcattatatgagtatcttactttcttactgttctcaatttgtctccagtctgagctctttttggagttgacagtctaatcactctagaatcttcttcttcttcttcttcttcttcttcttcttcttctttttgaattcaagatgttttattagctttcatgtctgcccatttgaatagtttgttcacatgaacactgaatttgggaggagagtgggatcaagtataattctgctgtagggactatctatgtggccaatgttaaaccatggaattacctaagctttagtcttctcctcttgaagacagggacaacagtccccatgcagaatacctccagatggtgaacacagggatgggagaattgccatgtggacaatgtacagagaagtgcttttcagcttcaaagtttcaaagtgctcactccactgttactgcataaaatgctccaatgcttagctttgcattgtctctgatctagattccattttttaaaaaaaaattgacttattcctttaaattatttgtgatatttatgagacagaacaacagctgagtgtcagtcacccacattggaaaggggttccggtcatcttccactgggtgggattaatgagggagatagagacagacaagctcctgaagggcaggggtgctgccttgtcccagttctctcagcctgaggtagagtgcccctgctcctccatcagtaggaaacctcgaacaggctatgagctatgagcagctatgagcagttatgagcagctatgagcagctatgagcagctgtgagcagctatgagcagctatgagcagctatgagcagctatgagcagcctggagggcagggacccttacacattgactttcattttctgctttcttcctccatccttcctcagccttcgcaggctactctggtgccacctgcagtttcttctgggttgacatgggaaggaggcaacacagagaaaaagaccagctgctctctctgtgactccagcagttcttggttttccttgggaaaacctaaggccttgatggcagggggcgggactcacatggtgccaaagttaggggccactcactcctgtccttggtcttggtccttggagtatgtggtctgcttgattggaaagtcaaaggagataggaaataggacacacttacattaatatgatgacctgtgcctgcaggaatggatgacagttgaataaggccaagaattatcttgccttacaaactctttcttcagctatatgcagaaattcacaacaaagcaccaccaatccttactcactcaactcagcgtgacaaaatgaatgtcttaagaacaatggaaacatgggcctacacgagctgtagtctttcgagtagtggaggttgtgtttagctctccagatactgttgctggtggtgttatgctagggttgtgtccatatgtcttccttcactctgaagatatggccaaagagaaggaggactggggtggcagagatgtgtgggtgtagttatggacttggggagtccttctttagctgtaatagtctgtgacagatgcaggaaatctagagaaggcactgtttgagtgcacaggaacaaggacagaattgattggctcatcttccctagacttctcatggtcagagagcctctggctgatgggctgagattgttcccatcccataagccccacgaggatcttctctcccaaggatggttcccctcaaatagagaatctttcaagagaacatggacgagttgttggggctgggagttgtgagtggggctaggtagcagcatggtcatgctgaagtcatctgaagcttcatattcagatgggttcttttcccccagtgcagctgcagctgctgttacaaagaggtgtaaaatgcaggtttaggagaaccaggggtaattagctcattcacagcctttcttagagttcacacagaattctgagcacccctcccatttcatttaaatatgtcgggagaaggtgagatcagcaggtgcaaacatcatgtggtgtcagaacaggaagctgaggtgtgcccctcccgacttcgtgccaggagaaagggttttaatggggctcaggggagtgtctacacgacatcttggagagtatgtggggtcagaaatcccactgtcctcctccctggctttcagtattagcttctggaagacttagtctcctgactgccagcagggtgtctctgatggtgccgcatagagtgctcactcatgaaccttgtcagaaaggctcagagtagggcaggacctagatgttctcactgggaaaggctgctgaagaggccggtgtttcctctctagtgcctcttgatttttctcttgagccttaattttccctgtggaaagacacagacaacttctaccttattgtggccacccaaaagtacctgaaactctttctccatagctttcctaaacctcctggaagctacatgaagctggcattccttgctggtatgttgagcgttctgaggaggtggagataatggacttccatactctgggatttccttcaagttcagagcctggctcccttgaagcagaacttcataggtcatctcacctgttgccctgccaacccatctcttctaaccacccactttctaaggccgtgcagcagccttctaaagcatagctttgctctcatgattcctctggtagagatgcatctgggagtctttgctgcttcctaggtgaggagggggagcaggacttggcatacattaaggagtgatagactcacagggacacgtcctctggcttgctgtgaccagccaaccagtgtcccagatgaaggtttgtcaggctacttctaaattgagcctggtcacattgcctgtgcagtggtttagaaatggtcacatcttctatggaaacagcaaaagggagtggatctagacagaccaacccataatagctggggtttgtccacagagtggtttatagagtaaccagaatgggatggaagtgggcttggaggagacaagggttccaggaggaaatgacagtttgggatacttgcaggattgtcttgaaggaatataaagaaagggcactccaagttctgggggtaggctccagttcctgcaagggtctgaccagaggctggcatgagcttagcctgggacatttgatagagttctatccattgagcttgatgtttctcaaggttatatccaacttagtgcttattcgttcattctttcttgtcatttattgcatatttactgcatggaaagtaccttactccagattaaactggacatcaggcacaggccttctcctgaaagaatcagctaatggaaaatagataaacaaacaaacaaaaacaaaaccaatagactatgagagaaaagatttggggaagggtacagcttcctagaatagatggtttggagggacctggcctcccagagagggtggcctcacataagagcagtgaactgtggggagtttggtcccttcaggagactggaggatgatgtgggccaggtgtaataaaggcgaggaggccagatgaggccagatcatcaggacatttcctgggaaagcaggaacgagttagactgggaagctccaggtcagacttgaagtttgaaaagatggctctgggactggcctagagcccagaatgaaggcgcagagaggcagacagaagctgaaggtattcctgtgaaaactgaggagcatactgcttgtaggaaagagaactggagaggccgctttggaatacatagttcaggtctagcctcgggtatgtcctgagagctttcgaggagagaaatgtccactcgataggacacccattggctagaaggcccaccgggtactgttggaggcaccacactgccagagggtggccaggtcacacatgtttgcaagaagatacaacccaggaggttttcatccaaggagagtaggaaggttgagattcctaagggagaaagtgtgagttgaaagtgagagtgggctggaaatcagtctggcggttcctccgaaaattggacatagtactaccggaggatcccgcaatacctctcctgggcatatatccagaagatgtcccaaccggtaagaaggacacatgctccactatgttcatagcaaccttatttataatagccagaagttggaaagaacccagatgtccctcaacagaggaatggatacaaaaaatgtggtacatttacacaatggagtactactcagctattaaaaagaatgaattcacgaaattcctaggcaaatggttggacctggagggcatcatcctgagtgaggtagcccaatcacaaaagaactcaaatgaaatgtactcactgataagtggacattaacccagaaacttagtatagcgagatataaggtacaatatgtaaaacatatgaaactgaagaagaacgaagaccaaagtgtggacactttgctcattcttagaattggaaacaatcacccatggaaggagttacagagacaaagtttggagctgagacaaaaggatggtccatctagagactgccacatccagggatccatcccataattagcctccaagcgatgacaccattgcatacactagcaagcctttgttgcaaggacggtgatatagctgtcccttgtgagactaggccggggcctagcaaacacagaagtggatgctcacagtcaactattggatggatcacagggcccccaatggaggagctatagaaagtatccaaggagctaaagagatctgtaaccctatcagaggaacaacattatgaactaaccagtaccccagagctcttgactctagctgcctatgtatcaaaagatgacctagtcggccatcactggaaagagaggcccattggtcaggcaaacgttatatgccccagtacaggggaatgccagggccaaaaaatgggaatgggtgggtaggggagttgggggggggacttttgggatagcattggaaatgtaattgaagaaaatacgtaataaaaaaaagaaaaaaaaagaaagtgagagtgggtaggagcaactatgacatcttagaggatattacttttaagagggagttggaggagggatgctagccaggaaaggggaactcagaagggaaaaagaggacttcgaatcctgaaaagcaggatgaatattcctaatgggaaatgcctggggctaaaattattttggactttagatatatttatttcagaatatctacacatatatatcatatctataatatatatatatatatttatttatttatttattttctgcatgatatatatcaagatcttttggggatggagcccaagtcttaaggcacaattaatttgtcatcagtagataccttatgcctacagtctgaaggagattttgtacaacatgaggacccacatgcacatcttggctcttgggatctggaggccactggtgacctttagtaagtttattcatggagttgggagggcagacgccagctggcagcaggctgaggatgtaaaccacagtcagaagctggccagtgcagagagaatggtgaagaggggcccctggggacacaaggaaggtatgtcaaccagagcactagggtgaagtaacaggctcggcatagcagtgtggcttctgggaaaatcacatagagctacttccatactcctatgccttgtagaagttatagaaacactacaggcaacagtgacatacaagtatttgagaccaagtttcacgtgcagcccaggatggccctgaactcatagcattagcatctttctatctcagcctcctgaatgtagggattgtgggtgtgagtgactattcatgaattacactgtactttacaaaattataactgttctgatcatagaagaaagatagtcttataaaaaacaaccctggaaaatacaaacaagcattaggaaagaacagtactccttattcactggactagtgtcatggtctttagtgggtacttgatacagtcaagccagagatttactgcttctcccatgtgtgtatatggatgataaaagctaaaaatgatggacaataagagatgggcagtgataattaacagcagcatataccagtacccatggcaatataacctccctctcaaagtgtcttgttgttttatctttttttgcctaaaggaacagattaatgtttctcttatagatattcaggtttttaaataactacctttgtgctttggggccatgattaagtatactgcagcagtacaacagtcagtatgatgacacagacagctcccatggaaccaatgggcaggtagcacctactgggtggatatgcttgacaaagggtcatatgctatattctgatggggacagggggcagtagtttgagatttcattatctacttagaatgttgtataatttaaagtttataaacagtttatttttataatttttcattgaatattttcaaaatttattaactgaaaccacagaaaacatctagaaatagggggattgttgaccagcaacctcacggcctaaagataacacctgctagcgtttagtgaatttccttcatgtcttttccccttcttatacatttcacattgtagaatttatattgaaggtaaaatatttacccctcaaaattactctgattttcttctgtaaggctttatgtataatttactatgttattaaatgttctatagacataatatttttaaatgaaaatgattacaaattttattttatgtgcatgaatggtttgcttgcatatgcatccttagaggcctgaggagagccctgaatcctctggaacaggggttatggatggttgtaagctaccatgtggattctagaagaacctcgctcttatgttagaacatacatgctcttaactactgtgacatctctctagcccctagcaatagcactttaaaggctatgtagtattccacttcgtggtgaactgatgatatatggttcctttcaaaattcaatgcagaatttaccattagattcagcagttccacttttgggcttacacccaatggaattaaaagcaagaatcagcacagattgtggacattcatagtagcggacattcatagtagcatgatgcacgatatccaaaaggtaaaagcaaaccaaatgcaactgagggactgatgaagaggccacatgtatatgcatataatgtatatattatgcatgtgtgtagatagatagatagatagatagatagatagatagatagatagatagatagatagatagatagatagtcttacaaaggaatgcagtcctggcattcactatgacatggatgaaccttgaagatgtcatgttgagtggcataaaggagacagcgtgacaaaagctgtataatttcactcacatcttgtacctgcaatgagtgcaagtggaagatggctgccaggagctggcaggacaggagagagattggtttagtgagtacaggacctctcttttggaagatgaaaaagtcctggagatgggtgaggattatggttaatatatattgtacattatatgttatagttataatatacattaatatctttaatggtgcagcagtagtacttgaaagtgttcaaagctgtgaattttatgttctatatattgtaccacaattagaaccaaacctaaggactgaatcttttcaagactagtttacatgtagacagcaaaatctatactttcttttctctctttttagaaatatacctgaatatattttggcagtaatgtgtggttgactatacacagagtatttctgcacaccaccccccctgccaagcaccctgggcccctttcttgtccattgttttcttccccggtgtctgaaaaactactggactgcttttcccccctagacacagcgtttccatttaaatgaaatcagagcacagccttcagactaaggcatagtgcttctgatatgcgaccctgcttggtgcacacatcagtatgcattcctttctattgctttcagtgccctgttctgtggacaaccaagttgtggtacaattgattgatttaccagttttgtattgtttggattgggtgcaccctgggtagctataggtagagagagatgtgatgaataaactgcccattgctgactacaatggccggcgtgtgtatgactccataaagaacagctctgctgttttccaaatggctgtgctcttttgcatttccagcagaatatcggatttccagttgttcccctgtctcccattcttcaccatgttcagcattatcaggctttggatggttgtttggacttttggctcagcccttgaataggtgtagagtcaacactggtttgagttacagcttgtgtttccctgatgatttgaaatgtatctttcatgtgtgtctttgctttttatgtctttctgtattgaagtgacttctcactacatggggccagtttttaaaaattaattaatcaattaatttttttacactctatattttatcccccccataaccctctgactgttccacatcccatacatcctccccaaacccccagtctccacaaggatgccgccgccccccaccccacctgacctctaaactccctggggcctctattctcttgagggttaggtgcctcatctctgaataaacccagacccaggagtcctctactgtatgtgtgttgggggcctcatatcagctgctgtatgctgcttggttggtgttccagtatctgagagatcttgggggttcaggataattgagactgctggtccttctgcaggatcacccttttcctcagtttctttcagccttccctaattcaacaagagttgtcagctgtttctgtccattggttgggtgcaaatatctgtatctgattctttcagctgcatgttgggttttttggagggcagtcatgataggtccctttatgtgagcactccatagcctcggtaatagtgtcaggccttgagacctccccttgagctgcatcccactttgggcctgtcactgggccttcttttcctcaggcttctcttcatttccatccctgtaattctttcagacaggaacaattatgggtcagagttgtgactgtaggatgacaaccccatccctcacttgatgctctgtcttcctgctgtaggtgggctctataagttccctctccctactgtctggcattttatctaaggtcccttcctttgagttctgagagtctctcacctcctaggtctctggtgcattctggagggtccccccaaccttctatctcccaaggttgtctgtttgcattctttctgctggccctcagggcttcagtccttttccctcacccaaaactaaatcaggatcccttacccagctccccccatccaatccactttcctttccttcccaggtccctccttccctccccacttgtgatagctttcttctctctcccaagtgggagtgaggcatcctcacttgggcacttgacctttttgagttctgtggactgaatcttgggtattctgtacttttttttttctaatagccacttattaatgagtacttatcatgaatgtccttttgggtctgagttaccttgctcaagatgatattttctagttccatccatttgcctacaaaatttatcatgtccttgttcttaataactgaatactattccattgagtacataaaccacattttctgtatccattcttctgttgtgggacacctgggttgtttctagcttctggctatcacaaataaggccactatgaacataatggaacacatgcccctgtggcatggtggagcatctttttggtatattcccaagagtggtatagctggatcttcatgtagatctatttccaattttctgaggaacctccagactgatttccagagtggtaataccagttttcaatcccaccagcaatggaggagtgttcctctttctgcacatcctcaccagcatgtgttgtcatctgaggatttgattttagccattttgattgatgtaaggtggaatttcggggtcattttgatttacatttctctgatcactaaggactttgaacatttctttaggtgctctcagccattcgagattcctcagttgtgaattctcagttttagttctataccctatttttttgattgggtcgtttggctgtttggtgattaatttcttgagtttatatattttggatgttagccctctattggatgtggggttagtgaagattctttcccaatctgtaggttgctgatttgtcttattaactatgtcctttgccttacagaagcttttcagtttcatgaggtccacatggggccatttttaattatgttgttttctttagtggtaggtggcttttaggtcacttacaattattgatactgcttaaatatctataggtacatgtatgtaaagcattgtatataaatattttataaaaagcattttacctaaaattgtcttcaattttagagtgtatacttcaaataatttgaaactctcaaagaaagtagacaatttcagcatcctttcttaattgctgctcttgaacaggacttgggttcagttcccaacactcacatggtataactatctgtaacttcagttccctgggcatctgatgcctcttctgaccactgtggttgtcacacatccatatggtacatttacatacacggtacaagcaaaactttcatgtacataaaataaaaataaacaaataaatctttagagaaattataacgacacagaaacatgccacagctctccatctacagggtcacctgcagagcatatgaagtttagtattagggttgccagttacagtattttcattttttcataaaatattaattcggctcagcctggtttctttcatgctcagaggtcatgcctaatttgcatagctgggaaggtaaaaatactttcagagcagaagggagaaagctttgtcactagtttaaacttagacaccagtgtcaagacttctacaaggggcagcagtttctttgtctagactccatgattaatgaatgcactgtatcattagagcactctctcagaaaatgcccacaccacttagttgtgtgcttacctaacctgtggattttgctaacagctcagcactttatttatccacaatgaaaatacaattaaaaccacttacactgtttgtgctgatatgccannnnnnnnnnnnnnnnnnnncatgtgttgtcatctgaggatttgattttagccattttgattgatgtaaggtggaatttcggggtcattttgatttacatttctctgatcactaaggactttgaacatttctttaggtgctctcagccattcgagattcctcagttgtgaattctcagttttagttctataccctatttttttgattgggtcgtttggctgtttggtgattaatttcttgagtttatatattttggatgttagccctctattggatgtggggttagtgaagattctttcccaatctgtaggttgctgatttgtcttattaactatgtcctttgccttacagaagcttttcagtttcatgaggtccacatggggccatttttaattatgttgttttctttagtggtaggtggcttttaggtcacttacaattattgatactgcttaaatatctataggtacatgtatgtaaagcattgtatataaatattttataaaaagcattttacctaaaattgtcttcaattttagagtgtatacttcaaataatttgaaactctcaaagaaagtagacaatttcagcatcctttcttaagtgtgtattgttccatattttgccaagtgatggtaccagcttattaaccttccagtagtagcaataggatggacatgtcaattattaatttgaatttctttggctatggaaaatttcaaaggtaaccactaaacattctatatttattttgtgaagtttctatatcttgctcttttagatattatacacaaaagagagttggagagatatctcagtggtcaagaccaattgctgctcttgaacaggacttgggttcagttcccaacactcacatggtataactatctgtaactccagttccctgggcatctgatgcctcttctgaccactgtggttgtcacacatccatatggtacatttacatacatggtacaagcaaaactctcatgtacataaaataaaaataaacaaataaatctttagagaaattataacgacacagaaacatgccacagctctccatctacagggtcacctgcagagcatatgaagtttagtattagggttgccagttacagtattttcattttttcataaaatattaattcggctcagcctggtttctttcatgctcagaggtcacgcctaatttgcatagctgggaaggtaaaaatactttcagagcagaagggagaaagctttgtcactagtttaaacttagacaccagtgccaagacttctacaaggggcagcagtttctttgtctagagtccatgattaatgaatgcactgtatcattagagcactctctcagaaaatgcccacaccannnnnnnnnnnnnnnnnnnngctgctcttgacaggacttgggttcagttcccaacactcacatggtataactatctgtaacttcagttccctgggcatctgatgcctcttctgaccactgtggttgtcacacatccatatggtacatttacatacacggtacaagcaaaactttcatgtacataaaataaaaataaacaaataaatctttagagaaattataacgacacagaaacatgccacagctctccatctacagggtcacctgcagagcatatgaagtttagtattagggttgccagttacagtattttcattttttcataaaatattaattcggctcagcctggtttctttcatgctcagaggtcatgcctaatttgcatagctgggaaggtaaaaatactttcagagcagaagggagaaagctttgtcactagtttaaacttagacaccagtgtcaagacttctacaaggggcagcagtttctttgtctagactccatgattaatgaatgcactgtatcattagagcactctctcagaaaatgcccacaccacttagttgtgtgcttacctaacctgtggattttgctaacagctcagcactttatttatccacaatgaaaatacaattaaaaccacttacactgtttgtgctgatatgccaccatcaaatagacttgtgagcaagcggttcctgtatagagacacaattcttgttaattattaaaattgctgctatttttattatattccaaataggtggtatgggatgcgatatgactcagaactacttgaatgaattttggcttaatgactcttacaagtaaaaagcattttgttttctctgacaaaaggctctagttcacttgggctttacagacagttggtattttatagtaggtttatggccgcctcttcatcaaacctgtaattatgggcttggcttctctgcaaccatgagaaattttatctagttttctttttcccacatacctgtcattctggaagaaaaatggcacatacatgtcctgcagatcaagctcccacgcattgtaagcaaagccaggaatgaagaaacaacggacaaacacattttttttctaaaatttatggatctatgatttgttggaaagattcattgatttgagagggttttatgaattcaaatagattctttaagccaagtaattcccatctgggggaagaaaaaaagaacagaatatctcatggtattgtgagcaggtagacttcttggctttaagcatgtttcccctccaccttgaaagattccttgggtcagcatgtgaaatgggggtgatggcacctgtctggatgaaggtcatgttaaacaggaaactgcctgatggtcttcagctggcctttgttgtcatgtgtgcttgcctgacagtggtggcagagtcccccactgcccaggcaatattgaccttcttggggggaggaggggaggttgatgttttgagaagaggtctttctaccatttcttggagtcatgaatgaatatgtcttgagtctcttggctgttgaggaggaagaagcatcgtttcagtatctaaggaatccagccatttacaaaagcatcatgctctgtaactggcacattaactccaagccaaggcatgcttctgtgtttctctttgttgtcttctgtatctcatggctcttgtagatgtggctaaaccagttataccaacgttgattttggtttcttccccagatggtaatttccagacagaaaaaaaatagggcagttattgtgatgttattgtgatgggaacctgccttggaccgttctgagcagaaaggacatgtctcacagaactgccatgttacagaaagaccaggaaatatcagggaccctacaaactgcaagcacaaactcaattcctgcagagatctgtttgttctcttttcttctctcctcttcaggatcagttgctttctctctctcactgtaactagttttgctctcttagtgagttcatggctggctacagctctcaggcttttgttttatatggctttaattgctgcagaagtgatagctgagctctatcacccatgtctaaatatcccagggaaggaactgcttgttcctcaacctactgcggctagcaatattacatgagaatgttacagtttgaggaatttgggtaaagaaggtggttctggcaatgtggcagtagctacacttatggactctgtcatgttacatagctagtccctggcatctgactttggagttcactaacacatgctaacaaagccagtgttgaaaacttggctgccactgggattattattagccaagcttttgtccttggctgggtgctgctctgtgcctggttagccatctcacaaatgcttgtaccagatctggaggggaccctagtaacagaaagtgtgtaggtggaggatcagcagaactctcttgccaccactggaaagacaacccaaagaacatgtatttatgttagcgcgatcttatattgtgggatttcccctctgcagccgttctccttcactctcagctctctgaagcacagttctggtcacctctacatgatgttgcaatcactgggcaccacaaggctctgcagagaggcagctctgtaagcatcctagagagtggttgtcacatatgtgtacctctggggcatgtttctagctattagtcattatcttttgtagctaccaaaagcactagagttagattccaaatgtgtgcgtttgagtctcaatttgactgttgcagtggccttggtctaggcagtttctctctctgagcactaattctcagatgtaggaaatggggataatggctcccctatgggtgatgtcggtgtgaactgtgaagcaatgagacaactttctttctgtttttgtcatcctttctgggacctgcatgccaattaggatctctcttcttcctttggtattttcattttctagatctgagtgaatactttatcccccagaatacagaactcgggaccattagtaggactttgattcctatttcccttatggtaagttaggcaaatataaatattctttgtacttttctagcattggagggagaatgtctctttcataaggggaccagcttgtagcacctcacagaatgaatttaggacattttaaagggatttaagggtagtggggcattccttccccaaaacttaatggtccttcaaagttaaaatttagggctgggattatacaaacaatctctcatttctgattggctggactatgtgcttcttccccaagggccttgtgagaaacaggtgctactcgcctttagttagctatttagttagctatttctcctgctcatgaggattgtcagagttcttcctgttcagtggttctcttccagggtagacatttgacaatatctggagacattttgtcatggctggtggaaggtgggctgctaccggtagttagtgcctacaggctagggatgctgctaaatgtcctacagtgcaaaggtcagctttccagtaccaagagtgagctgtctctaaatgtcagcacatctgacatctgtgtgatgtgggtttgactgttgagctttcttttgatggacaaggaaaggaaggggtttatgccaggacttttctttttcatcaaaggtgtattttagtattacccactatgtttcttttgaaatttgaccagggaaccacattttctattccatgagtattttcccacttttgttgaagtcagaggcacttgttcctcttgtaaatggcatagtctttccttaatagaaagggcaagctgatcctgcctgccttcctattctcccaagaaattttaggtccccttggctgtaacttattgtctgtagaacagatcaagaaatagaaaaaatcccacaaagaacaaaaaaccaaagcagaaacagataccattctatggtgatagttttcgtgtgtgtgtgtgtttctctctctgtgtgtgtttctctgtgttttgtctttcatattacctatttcatttcagggacctaaatggggaagaagtttctttctgtaatgccatgtctcccgttcttggaacaccgtagtaaagactttcaatgcaaactattttttgattaggagaaacatcaagaggctcatggttatgttaaatcggcctctcacattgattcacctgccttttcagagcagtatccttagaaagaatttgtgtgtatgtgtgtggtgggggtcagtggaggtggttagggctactgtgggtaactttcactagagggtcatgaaatgaacttgtttgcaaccagcattgaacataagaaaggaagtattgaagagaaaaaaaatgcaagtctggcacacatagggtaaatattattttatatcaacctgtcattattgtaaaatacactccctgctttgctgtgatcaaaaggtctgaaaaagaaatcccagtatctattatacttttcctttgttctataacacaggtcagttgaagtcctgaagactattatttctttatagatcggtggcatgagttctatcagctggccatttctaaaccaattactgccgatgacaatagaaagcttgttaagcttgatctggatttatccatagcacgtctggagcccagtgcaagacatgaccacaggatagccctcctaccagagaagaattaattcaggtatagagaccaagtccaagggttaaagagaaagtgagatacctgcaggcaggaaggctcttttggatacaaagtggtgttgtgactagctgacgcaccactgacacatttaagactatcagccaaagctcttagaacattctgcaaggctccatccaaaccaacacattccagaggtcttccttgcctgtgatgtttttgagttctgcagattcgttctccactcttcctgccttacctggttctagccgcacctctctggttttaatatcttaaacatgatgatctcctgtcttcctcgctgctccttctatgttgaagagtttatccccttcttgtttcccctgccctactcataggtcccctttgacctttttacttactttaactgtatcttacactaagatacattaactgtatgttacactaagtgtgataaggatagctacctcctccatcttggcctctgtgggaatgccacctgtgtgctcagtaagcctccgttgactacagcctgggttttgggctttgagatagagctagccctagtggtatcaaaggactacagcatagccagtgggatgaggggagaaggaggctgcttacaggtactgggagttaggcagtcagatgattttctcatcctcagcttccttggttttcctctaatatattttggtcaagttgatttttttttcttttgaatagtttctatgtgaacaatttaataaacgaaacctcttttttctcctttttttttataacaataaaacgaaataaattctctagaaattgatttccaaatcaaatcacattcccataatgtatttaaaggaaatgaagagcataacattgcgtgtaattcaatggatttttgatggatcataatgatttgcatgtgtggttaaagtgcccttggtttggatctctgattgttatgtaagtgccacagacacatagacacatctcctgcgcatgcgtctagattttctgctccagagagactgtatcaatgttcatgagccttaagatggggcttttcttgggctccactgttcctattgctagagaaatgacctataggacagaagcagaaagacagctcctgccataaaggagtttggctctgaatcgagttataaggacccaacaacttatcattcattagagttcttgaagacatgtaaacaaagcatgcctgagtgttcaatgtaacaatccgacttggggactgagtagctgaatattcaatgttgaacagctgtctggatactgagcatagttgtaagctgcagaggctagtgccacttgactcaagtgacagaaccagaaggggcctgaggggcctgaggggcctgtctttgtgttcacctcatttaatagatgaggaaacagataattgcctttctcttccttacctgcaataccaacttatcagatgctttgcatgtgtcaggctgtagaagacactggttttaaaaattattatttgttttcttatttatttggctcttatctcccagtgaggagtctactttgtgtacactcttgcaggagtcttgttcaccttggaaacactaaaaggctatccaagtgcagctaggttgtgttcattgggtcatgctgcttaaaaagagactccattccttcatcttctgctgcttctggggctatagttctcctgttctttgggaccttcctccatcttcaaaactagcagcatggacagcaccttgcttcagttcttccattgccatcttgtccctagacaagtcttcctttgccattttcttagaagtaccttagcatttataaacattgtatattccagaacaatccctcctatcaggatatttaactctgagtaaaactgtcttatttgtagcagatgatattcatagcttccttagattaggacctggctatccctagtacaccaagatccctgctttctgaatttctcagactagttttctgatactcttctaattctgtgacttcctagtatgttctcaaaatatgttggacctgtttggtggggatgggataatcttaaactattttacctttaagatagctaaaatttatttctattgcttgtgaccaagaatcaatgtggtaaatcagtactatgcaaagaaatttacaagcattagtttttaaattccataaccttccttacaaggcctttctccatttgacatgtaagaacattgttgtctcggagtgacaattccgtaagtttgaaggcttgtgctaggattagagttgaaagttgatcagagagcatgtgcttcactcttttcctaaagcagaagtgtggaatgtgggccagaatatgaggtctgaaacattctgttttggttgagaaagcaagggaaagaagaggtggtccaagcaggagaaaggctggagagcaagaggcaaatgcaagacacaaattttaagggaaatgcatggtaaaaattggtgcctttatggaggtacagcactatgagaaatgaagagaaatgaaagaccaatgggtccatcgtggatcatagaatacgtctaaaaaaaacaatggacccaaaccatgggatatgtggactgaccacagtaataataccttggctcaactctgctggacatccaactttaattagatccctttctgaattctggtctccttataatgtgggctggctaaacacttgacacatttttgactaatattagtcaccctctcatgaacagcacacctttaaaaagtgatgcgcagaagcagacaggtgatttttagagggtgggtggcaagcctacgcctaatgttaaagacccctggcttctgtctattctccaaggagaacttgcagatttgctgagggttgggcaacaactaacagtaggagctctctacacagtaattgctggctcccaatgtgtcatgattagctggagtcattacttttgggcactgaatgagactgtaatgctcctgagcgtgtgtgtgtgtgtgtacacctatatacctacatacatatatggtggaacaagatgttcatttcatggtgaatgaaaagtaaaatagtaaagaggcccaggctctacaatcccctttgaagtcacaccatcagtagcctcagatctcccagtggctctacctaggatttctatgagacaggagccaaaccttttaacacacaggccttgagggaattccagatcaaaacttgagcaccacctgagtgtaatatgtagacttcgcaaatagaaatgtaggccgctcagttgtattagttacttctctgattactgtgactcagtcagtacctaacaagaagtaacttgaggaagcaggtttatttcaccttgtattttaagaaggaataaaggtcatcatggtggggaagatatggtggcagaaatgtaagacatatggtcacactacatctgtgttgaggaaatagacagaggatagaaagttggagtgggctatgaagcaccaagctctgccttctgtgagccacttcctccaatgatgctcaacctcctaaagtttttataccctccccaaatatgccactagctgggaaccaggtgttcaaacacatgaatctatgggggggggcacatttcacactcacaccccagcactgtttaatttaaatgccagattttagatagataatgaatatcccacacattattaaaaaaaaaactgcactaaacttacttagttgtactaaaaactatttcagttctttaagcaaaactcaaattccactgagcaacctatattttatctgacaattctaaacataagcccactgctgcggggtattttcagacatggaagtgaacagcagaacatgtctgtaaaaggagactattgccctggattgacaaggaggctaagaaaattccctgaggtcaaaaggaatagaacagtgaagatctgtggatggctgacctgggagatggctaagttctaattgtccagggcatctcttgcatccttgtctcctctgtccctccacagttgccacgactagaaagacttctgtcacatcatcaggatcagatccacctccactcatcacctcagcccctgacaactgaaagcaaaagtattagaggagaggctgagctgcaacagctagactgaagcaattaccagactggactgtgtgtacgacatgctgtgtatatttctggtcatctgccctctgctagggagggcaggaggaattgagtacacctctgtatagaactttccatcctttcaatgcttacaagggaaaagtacatggaaaaaatagagcctctgctcttgaagcgtatatacacagagctcttgggacagccgagagcttaggtttttattaactcagactgaacttatcctgggtggccttcttctgattttgtgatgtgtgtgtaaatattgcagcagatgctacctgccacgaaggcaatcttctagtcatggagacagacaggtacctagagaattctgatggtcctgaaagggatcagtggcaactcacttggtggtttatggcttgggatgaaaggaatcagactcactaatgtgttcagagacagaacatggtgactctgggcaacacactggaatagcattgctgagaagtgctaagtcaacctcacacagcatcagggcacaacaggactaggagagagaactggctttcttttaaccatttaactctttctaagcctggcttcctcacagaagtgaaatgtagacaactgtcttgttagatgaatttttaatgatttaatcatataacatttgaaaatgctgctagcaaatgataaatgttctgtatttgccaccccagcgctccctaaacatctctgtcatgagtccatattcttctatgtgactgcttccatggactgagtgtcaagagccatgtccttcctctcttcccgcattagacttgatagagctttgctgagctgcatatacatcaacacctggtttttcctggagaggaagcttctggcctttgtatcttcctctccttgtcactccctccctctatcattcctacggaggacatccttttctgtggggtcatagttgaggagtgtattacaaggtcctcatcagactttagatgttgggggataggttccttgcgtactcctagatgctccaacatacctatgactgaataatacccagctttcttggcttttctaatctttccatcaggaagtttgaggatacctgtggtctctatcagttattgatctgttcaaattcattcattttttgtcagcaaagatcaggttcaaaccatcaagcatctgtttaataactctgagaataggcctgaggatgtaggcgattctgatgtagactattgatggagatgggaacagggtttgctgggcccccagagcagggccccgttcctcaatccactttgccctctgtcaatcccattgtttctgatcttaatacatggtcaggggagccaagttatagctcctgcccccaaggactttgtgaacattagaaattaagaagcagccagtggctatgtatgttttaaaagctctgttgatcgtcttcctgcactggaagaaaaaaaaagaaatttctaaggaaccaaaaagctcgaggagcccgggctgtgtgagatcctgtttggttgttgggagtgcaagatggattcagtcaagagtacacttgatgatggggtagtgaccatgtcacatggctggctacgtgagtcccctgtgataaataacacattcctctgtctttcatgttcactttgttttcatggtacctttctgacatgaccttccctgcacgcttccccggcacctgcttctccattagcttttatctcttattttcctccttgcctgcatctccacattttttttaaactaggtctgttagcgtctcgttctcctgtcttccaactgcattttcactgtgtatccttgctctcttttaacaatgtcttctgcctctgcctccatgttccaaagcatacctgtcatacccaggcctggggaggaaattttcacttccagcagctctttgtgtgatgtgaaagaacatctgagtacctgggtctcctaggaaacagaactctagtttctgagcagagcagattccatacactatgtttgtgagacaccaggaaggagagtctggcacctgggcagcacaggaggctcagacttgagtccagcctttgttcaagagggatgccgaacaatgcacctgctttccctcagtctctatccctcgcatatctgtcaagtgtctttctctttcacttctttcttttctcttttgtctatttctgtcatagtttttcagttctattttctacatttgtctttgttctttttcctctttagaagttacgccatccccttcctgatggcctcctttaactttgtaagctaaaatgtggtgggggttgggatcaggaaagatgcaggacacttggaaagctcgcctaggacaagtgctttatgagagtaggagaggtttgcttattatttgagattgtatgagcacagaattacatgaaacttttcaatttatgtatgtggtgcgtatgtgtgtgtgtgtgtgtgtgtaagcatatgctttccccgtgcttgggtgtggaaatcagaagacaacttccatgtactggccctagggcaatgttctgctctctatttgagacaggccttgcacttttaggcatctacctcctttctgcctcccatctcatagttgctggtctcacaggtgtgctttaccatgcctggctttttaacgtgagttctggggattggcagtgcaagtattttatatactgagccatctcccccggtccaaagtataaaatcctaaagctgaaagcaatctccactacccattccaataacataatccagagtgagcatcctctctttgtcctaacatgagctgtgcagcacgaaatgcttgaatagtgctaacgttgaaagtgttcttctacagtgaggcagcttgtcaggggccaaagttgtgtgttcacagtcatctctgtgattatgtcatcttggattggtatcctcggtacctgtggatcttgcatctgtatcctagagccatgggacctttcttacggttctctttgcctacatttgaaatctttcagagaggttgcccaaagaatagttaaattggccattctttctactatgaagttttccggatgactcatttcccagtgcttctaaacagaggggctaatcttggagaggctgtaagggataaaaggtattatctcacaaaacaaagaataagctagcaaaatttaaatcagtgttattgatctttgtgtcagaaacaatgtcaattatgcactttatatgtgccagtaccttattattattattactattattattattattattattgcgatagtatctcactgagcaccctatgctggccttgaacttgcagttctcttggctcagccttataagtgtagtcgttagaggcatgcatccccatgactggcccagggcattctttatctttaacacagtgtaattttatatctaaaactaggccattgtacttccctagtttatagatgaaaggcacaacccaaccaaccaaaaaacaaaaaccaaacacctagagtttgagagatttgtatcaagtggatagttctttggaacaggacttaaactttgcttgtctaacacttcgttttctgcctcaccactcacaaatccatatgtgcctttgcccccaccatatctactttgtccataggttctatgcaatgcattgtctccttaacatgtgctatacacagtctaatagtagtcttgtcgatgtgtagatgtgagtacgtgtgtgtttgtgggtgtgactatagaaggtggaaaaatgaaagcacagaaagccagtccaggtcaaagtctggtttggaggcagttagaaaacatgttaataatgtataatgaccacggacatagctcccagtcatgaatgtcagtataatttattaatttggtaagaattctgagcgtcaaggaagaggagagtaagttacttcttcactgaagttaatccagaaaaattccctaaagagaacaggagacaggaatatgtgacttggaaatagaaagcataagggtctggtagcaggaaaggaaggggttgagaagagagtgagggaccagatttggttcaggtgtgggtctttcgttggtgtccatgtgctctgctcatgatctgggactaggactcgagtatgatggtaacttttcctttgcaaagtaaaacccagatggctatatttaattccacttaacgccactggtgattcacttgggctcaggtgcgcccacatacagctggcactagctttgtgtactttccaggcagaggctgctatagtccaaactccccatgaaacaggaggggacagacaggctgtgataaccttgagtcttttgtgtctctctccacagcatcctggccactgcgggaacccacttcaacacccacgtggacctgcggaccctccgggctgtgcgtgtcctgaggcctttaaagctggtatcaggaatacctagtgagcacctactttcttctttctgattggctagtatcctcaattggatccaggttataaagcaatgtcaggtggaagagaaagagttcttcctggagggaaaccctgaacttgcaacaattaaacatagcactgtgcttttaaatttaacattttctcatatttaaataataatggaagataacaaaaaacaggaaaggaaaataaaagaaaagtttattcctattgtattacactgaaataaatgctaattggatgcatttttttcattcatttcccctatgcatccaaatataattttaattattacatatgtgcagtgttatctgctgcaataagtgtttcagtctcctaaggtgaaaaattctatgtattgtcagaggttacggtttgttaatcagtactgtgcttctctcccagtgggtggagggcgggatctgagagggagtaataggaaaggtcaactttgcccctgttttataggattgtacagcagcagggactttagactgagtatgaaacacagcctaatgaattgaatctgtcaaaggaatctatatgtcatcacagaggaaacagagggtgagaaggaaacataggagaagggacatagatgatggcagtcttcagtttgacttgtcttggttacttatctcagaattaatggtttggtttttgatggaagactaggagagggtaactgagcccatcttgtcagggggcagtgaacaaggtctgtgcttcactctctcctctctccctaggcctgcagatcgtgctgaagtctatcatgaaggccatggtgcctcttctgcagattggccttctgctcttctttgccatcctcatgtttgctatcattggcttggagttctacagtggcaagttgcatcgagcatgcttcatgaacaattcaggtaaggtcatgattttctgtcttctcttctcccagtgcttcttccctttagtcataagcataaattcacgacatttggagctttgctgaaaaagtatactctatcttcagccctaggattacagtcagaaacttcctagtctgtagcttttggaggtacaaccagcttaaagatatatctacttgaaagttacattacaaaacatgttgctttgtatatagttggaggggctcaaataggtggtctcagatcctctgtccatgatagagggcttttagaatgcatgccaaaagccgttatgaataaatagtctacagaatatatctttgattcaaagaccagtgggaccctggagaagagaatcagatgggtgtcctggttgagctacaaagagagcacccttttgtgctccatctcacattcctgagaggactgaaggagctgttagtttggcttatcagttatgccttgaaaattgtgggatacacaaaaccccaatttccaaatatttgtatttttttgttcattccaagctaagtagtgtacaataggatgaaagtcagagaggaggttaagagaaataaagaataagttaaagagtcctaaataaataccatgtttttatgaaaagaatctccaaatgatttttattttacctttagtttaaaataaagtaaaaaaaagaatgtgtgcctaaaacttcaaagagttaagaaaatatagcagccggttgcttacaactgtccccaaggagcccagggagaaccaaggttcatcccagttcccagggtttggaaaatgaatgagatttaccattacctcagtgtcttgtgtgtgagccagccctgtaaatttctgtagcagtgcagaccaaagtagagcttcatgcctgaagaagatagagagttctttaggagcattttgagttgcacatggatatgaactgaggggtgtagagagcccaaggcgggagagggtctgaggcaagatgggcaaacatctgtctacagtaggagaaatgcttacttatggctccctaggatcatttccatgtcatactaagcaccgcatggtttgtctcccactctccaaatacatctgcaggtattctagaggggtttgatcctcctcacccgtgtggtgtgcaaggctgcccggctggttatgaatgtaaggactggatcggccccaatgacgggatcacccagtttgacaacatcctttttgccgtgctgactgtcttccaatgcatcactatggaagggtggaccactgtgctgtacaatgtgagtgagctgatggatgtggtgtggaggatggcgtgggattctggtgtcgttttggtccctctggaacaggaaagactggggaaatgttgggattgtccggactcaactttagaacttagaagagcctaacaggtcactctcccacaccccaacccctttggatttttactgagtggaaatacgtaactgtcttattgcaattggtagattgtattcccttattctgtcaatgggtgaatgaacaagttaaatcagatcgccttgttgtggaaagttttggatttacaaggtaatggggcacagtgaggtgttccaataagtgtaaaggtctcagttactgtccccaaagggctcaccgtcagattggaaagctgttatagtggttttcaaccccagtggcccattagagtcagctgggagctttaaaaattatactgcctgggcttcactccaggccaattaagtaggaatgtctagaggtaaaggcctgtcattgacattttttaaagcttcctagctgattttaatatgcagccactgtcaagaactactgcattacatgcccagagaaagcatggttaattgtgagactcattaaaatgcttctctggaaatccaagttcctaggttcctgcccgggagattctgactttgggtagctgtgcataattggtgagctgcactttcagggaacccttggtgattcatgtggtcaggtttgtctgagttggtatatgagacaaagctgaccagccacctgacagagatgctagagattccagcacggaaacagaagttagacaaagtgactgtgcctcttctgccttccagaggctggttgtcataagtctcccaaggcatggtgtagagtccaagttcaatcatgagcactgggatgtgcatgggatgtgaggggggcagagtgagcagagcaactggggaagatgcttgggaaggtttatatcctctgtgcctttgccttcagtcatttggaggcatgatgcgacttatatatactccctttacctggctttaactcaagatgcttacctttttcttctgttcttctctctctctctcatcacatatgtacaaagctaattaagtaagtgcagtgtgacttacatagaaagcagcctttgagaggaaaatccatgtcttaggaagagattcaaccaaacccgatgcccagagaacaaggattatatgaagcctaaatgtgtaggtacttagcaactgactgagtattgcagtcagcccccttaggtcccaatatatggctgctaccagttgtggttgcaaaatattttatggcttgttaggatattgctggtaagtgattaggcctagtttggcagtacctataccaaacttctatagtcaattttatgtttgtcactataccctgactttacaggacaactacttctatagcatttgcactttattgggcattttaagtatcagataggtgatttaaagcaatgggaagttggatacagttatatgcaaatactgtactatgtatgggagtggagaaacctcagattttggaatctatggaaggtctggacacctatgttctacagatgccagggaatgactaaactagtctggatctattcccatacaggatgagtaaggtggaactgagaaatttagtaggcaagatttacaggctgttgtgctaacattcctgggttaggatagggtaggatagaggtttcccacaccaggtgatgctcagcaagccctggatactgtgattcaggaccccctggcgacactctggaattcttattagctatgggaggcagcagggaggaggaggcaaacatggtgagggcatagtcacttcctatctgagatgtcaaggttgtcttgaggcaatctcaccaagactagccaagggaccttaagaaattatcgtgctggccctgcagtggctggtgtcacttgtagagctttgaaagtgatgaacttcaattagatgtgtagactcacctaagtgatgtgataaatgcatggaaagcctacaaggagaagtgttgcatttgaggatctaagtgcgatctgccattcctccgaccagggatcagctgggactgagatgcgccagagtggagcagatgagctgctcatcactcccgcactggtcctcttggagatcattacttatttctacaactattgactttgtagatattctgtatcaagcactatgcagaaacactagcaagatggcactggggcggggaaggggtgcgatccctactggcatggttctctctttaaattcccatctctcctgttgtctgtcagttgtagcaatagagcctacacaaagcaactgtgatctagctcttgcccggagttttgctccatgaagcaagcagggagggaaagaggtcaatgacagatcctctgaaacctttcatcacagcagttcctagggccacagactcacacctctctctgaagtccaacctgttagtcattgaactgaagcctcctgctggccttgatggttggatccaggcatagaagaactggctgagcaataaggttgattcctccaaaatatctggctacaaataggcaaaaagaactcttgtgtactctgaaaaaaagcagtggcatggggcatggggccaggtatcactggcagaggtgacagtcctactgaggtgaatagctgcctcttgattcaggagaaatcaaataaaaatggcactcaattttcagtaagtggaacaaagacaaagtctgtattttttttttttagagagccatcaaaactggtcttagttgggcaaggacctaattgaagcaagacccaataggggctgtgcagaggaactgggtacaccttgctgacttaagcctcctgtcactgcagagatgtgctccatcagactgactctttggaccacaggaaatagggctggctatggtaaaatcctatcataaaggctctctatttgttgaaatttaactattcatctttgaaagaaaagaggattggggaaaggggagaaaataacagtggagatggtgtagacaaacagacctgccaatcctttctgtgtgtttgttctccctgacagctctattgtcagggttacatgcagacaagcacctagaatttgtttgtgtttttttgtttgtttgttttttaaatctttgaaaaccagtgatgttcttggggtttattgtggattattctgggaggtgcgtgagtgcggagttgcttaagagcatgggttactcaaggaagctatgccactgaaaatcacactccagcatggatgctacatacttgaagctccctggccaacttacagacagcatggtgggctagacagtgtcccctccctagcagttattaatgatcttagactctatgatgacaaaatttatatgtgcaaacatgatatttataaagcatggacttaagtatgaacaacaaatcaacttaatatcatgaatacaagtatgtatgtctggatattttatacaggatttactacctccagtaaaacacagacattaggatgtagacttcccttctgtattagtcagggttttgaccagaactgatgggatgaatatttatgaaggagtttattaggatggcttacaggctaatccaacaatggctgtttacccatgtaaagtgcaagaatccaatagttgtttagtccaccaggctgaatatctcagttggtcgttagtatactctggaatgccaaagaagtaggctttaatgtcagtgaagggatggatttgccagcaagagcttgggtaagcaggcaaagagcaaaccatttctttttctatgccctttattatataatctgcccccagaatgtatagatcttcctacctctaaaaatctggattaaaggtggccctttctgcatcagatgatttagttaagaaaaataccccacaagtatacccagctgcttgggttttagttaatttcatgtgtagccaagttgacaaccaagaagagctatcacatcttctgccacttcttgttctgtgatggcccagtccacctaactgatatgtttcatcaggcagagcatgaaaagaagagagctactctctaccattctattgtcccttctttttaatgatacaacaactatacaagactaattggccactcagacgagaaagagagtcttagttatgggtgttacatactccaaaagaaaaagaaaaagaaaaagaaaaagaaaaagaaaaagaaaaagaaaagaaaaagaaaaaaagaagctctcaggcatgaaggttcatcttgaccatttttcccctaaaatgttatcctagttttctctctattgctgttacaaacatcatgagaaaaatcatgtcacatagggaaaggatttatttgtctcatacttctaggtcacagtccattattgagaaaggttggcgtagtaagtaaactcaagcaggaacctaaagtagaagctacttgcaggcttacctacagacctatgctggggtagctttcctatatagcagagaaccatcttcccagggaatggtgctgcccattgtggacttggcacttatacagtaattaataatcaagacaacacccacagacatgcctacaggctaacctgatctaagcaatccttctattgagattcccatctcagatgactctgggaagtgtcaagatgatgactaaagccaaccaggacaaaagcaaaggtttttgttccctgtttgctgtacagacactttataggtgtctttggtgactttggtgacactctgccattgactacccttacattcgtttgtgtttggcttctctcatcattttataccataagggaattagtcagggttccattgccagggctacatggactttcctcaggcttactttagtctctaccaaaatttcaattctgcttggtcaaattccagctgtattcttggcttcccttcctcctgtggtagaaagaatacaaagcagttcaattctgctggctgcttctacctgtttggactacagctcccaaaggtctcctcaactcacaaactctccctggcacttagtaatttaattaattttatttaccccaaacctgatagttgttccttttcatggcagcaagtcctttccttgaacagtgcagttcacttagcaaatgtgtctttggcttaagtattaaacctttaatcctcttcatgaggactagatgtagccaagagaatcaactctttcctgattctgacccgagtttccactcacttttgttattcttgttttatgctgtctgctgattttattagctgttttcatgtttttagaacataatattctgattgccaagcttcccaggtccctatctgcaattatttgggtctctgctattaatgttcaggttttctgtctgcctgcctgttttacatgtctgtagctggtgttatttcttttctcacttattattgatgcagatgtggatgtagaaaatcctagagccttgctgctttcccagatgtatagtttgcctgtctctgcatggagtgctcccagccgctgttgtggaagatgtctttgaaggcttttggcaaaagaggcaacttagagtctgggtgcttcctgagagccaccttcactgctcagaaagcctttggtttatgcgggtggctctctttttatcctgccttctagctatacagttaatactagttaaattcgataacatgtgtttactttctgcctcattgagattttgctcaggtgtgtgatatgcaagcatgttgaaagaatcccaccgtatcccagcgctagtgaaaaaaaaataccattttctttttggagtaattctgttgttgtggtatctacagaagacaccacaggttgaaggatgagagcctaggggacgtgtctaatctttgcctcagtcatccatcctgtattgcttcctcccacatgctttgatgataggaggacatctgtcaaagctcgtttgacagatgagtggcaggagtcctgatcttctcacggagctagaataatgaggtaccccatctgatctagcagctgacctaggtaacatctggggggcacttctagctagtctcactcttgctctggaactgacagtttgtcttcacatctcccatctgccatctctacctctctgtttctgtgtaagagcctgccatccaggtgaagcctggattctgatacctgtgtgtgttcacctgtgactcatctgattaatggagagattgataagtggatcttgcgggcaagtctgccccctttcccatgaaggctacagggcaaggtgtgcttagcaaggagctataacttccccctcattactcccaagtacctggaagcacgtattttttcaagttctccaaggagagaaaagagattaggagatattgcttctagaactcacagtaaatatttttctctcttctgtctactctcataggtatttatagacacattaacttattaatttatttagtatttgttatatgccaggactattgtagatgttggggatatagcagagcccctacatttgtggaatttccatcttaaggacataagtttgggatagatagcaaacgtggaatatatcagatagagatagatgttgtggagaaaattttaagtggagaactggtaaaggttcacttttacatgaagctctcagcaggactattcagagaagatggcatctgagcaaggccttgaagctggtaaaggaatgagctaagtggttttctttcttggttttctatgtcccatgtagctgggataacattgcaaggacctagagatgtgccagttacatttacagaatagcacagaggctagcatattggagtacagcgagtgacaggtaaagccaggaggaggatgcggatcacatggacctggtgactattgcttttttttttcttttcacatcagtgggataaaaagcaatagggcaggggtggaggacagaagtgacacgacctaggttgcatctaaagatccagattgcttgctaagaacagactctaaaggagcaagtctggaagtaggaagacaagttaggacatcagtgaaatggtctaaggcagcatgacgggaactccacccagggaggcaacactgtaagagctaaatggtgggtggttctaggtgtgtagttggctagtttcaagaatgagagaaagcagaacactggagttatcacttggggtagttaatagtttgaataaagattaagaattgagtttgggcgagttaaactttccatggttatttgatgtggtagtatggtcatgacattgaataaatggctttggtgtggaagcttattcaggaaatatcctttgggacgttttcagtgtatggatggcagttgaagttatgagaccataaaggaagtgagtatagaatggaggccaggggagattctaggcctgagttccaaaggtaaagtgttggggaaaaagtcaccagcaaaagtgactgagaaggagcggtaagaaagtgggtgtcccgaggccaatggaataggatgctttgaggagaaggaaggagaggaggggaaagtcaagaagggaacacatcccccctgaagtgccaacatcacacaaagcagactctcttctgtattcctttgctaatagtttcttggagatttattcattatatctttaactcacattcgtattttctctttcaaaaatgctttcctcatttaagtcaaatgtttctagtgggtcaaataggatgctggtgggaaatgcgccatcttaaggcaggaacagttaagggactgtgaagaggttaaacgagaaggcctggcacagtggcagatgaagtgctcgaggaccatacaagttctcttccaattccttcttttgttcttggggaagtaggaaatgagatcatcagctgagggagggaggaggaagaaggaagatgttggagggttgcagagaagatagaagccagctttctaaatgtcggagtggtaaacggggtaggaaaatggtgttggttctgtgcagcactgaagaaccccttggtgtgagtggctatgaagtccacaggagaccagtgagcggcacagagtgctttcaggagcttagccacttcgcagctaacagtggtagataaaggtctggctttttccaaagcaattttgccccatgagctcactcagggagagagggctgggagagtgtttgtagcttggcagtggcatctgagctaggtaaagagaaaagagctagggggtagagtaaaaatggccctttatgaagcccagtgaaaatgtgcagggcaaattcagtctgtggagtaacctacctgttttattattttggaagtagcaagttggttttgaagctgagcgttctgattcatacgtggggggaggggaggtgtcttcaccctgctctcaggagagtgaatatatggtatactgcatgagtacactgaggtcatgactgtagtcaccctacacagcctctaagccagtgcttctcaacctgtgggtcgcaacccctttggttacctaagcccatcagaaaacacagatctttacaccattatttataacagtagcaaaatgacagttgcaaagtagcaaccattttatggttgggaggcaccacaacagagggaactgtgttaaagggtcacagcattaggaaagtggagagcccctgctaagcccttgatgactcaaccccagagagcctgaatcctactgtcactgaagtccaaatgttttcttgagaacatttagtgactgaaagccctcaggcccagctagctgtctcactagcactatgtgcctaaatctaatttcctcccccaattgattttttaaattaaattaacttatttttgagtgcaggggctggtgcatgtgtaaacatggatatggggtcagatgttgacactgggtgtcgtcctcagttgtcccctaacttcgttttgagacagggtctctcactatacacagagctcatgcatttagttggggtttccttctgtctctacctctccagtgctgacatgatagactcatgctgccacaccccgcttttacacttatgctgggtatcaaactccggttctcatgctcccacagcaagcatgttacagaatgaacaatctttccagcctctggatttagtttttaaattagcacacaaagtaacaggtttctttatggcatttccacacttaattaggttgtctaataccctctccccttctgtcctctcccctctactccctcccttccccttctcttctcttccctttcttttctttctccctccccttccctctgtcccctcctctcccccttccttttccatcctcccccttccccttttttcccctcacccttcctctctcctctcctctcttttcctctcttctcctctcttctccttttttctcctctcctctacttttctctatcttcaccttttctctaccatatggctcctataccactcctggacatatgcctaaaggactcataaagatatttacacatctatatttactcctgctctgttcacagaggcaaggagatagaatcagccgggatgtccatcaaaaaaaaaaaacccaaaaaacaaaaaaacaaaacaaaacaaaaaaaccaaatgaatggataataaaaatgtggtccatgcacacaatggaattttatccatctgtaaagaaaagaaaaatgacatcataaaacgtgtaggaaaacatgtaggtagaactgagaaatgtgctattaagtgagctagctcagacttagaaagacaaatgtgttctttctcatatatggctcctagcttcttatctttgtatgtgtgtgtttgtgtgtgtgtaagggcaagagctaagaaggtagagggacctatgagaggggaaacggtgaggctttaaggaagggacggagggagggagggaaagttagaaaacaatgcctgtgattttgaagttgaaggacagctactgggggggaggagggggctaggaggtggtgcagatgattttaactgttgtgtgaagcactgcgccagcctgtttctaggttagtcacatgtcctctttggaagtcctgctatgcaccctgctggaatcacggacctgtagcatcccattcttgggttccttgtatggaaaggaacaggttttcgccctcatatgtgtcacattcccattcatagctgtctctgccttgaaatcattcctacgctctgcagatccatcttgatttcttaataatttgtcaaactagggatgccatcatgtttgggatccgctccaaatgcaccgcttgcctcctgaaccggtgcctgcatttcacaccatgcaccaggctggtctcccagtcttttgtctgcacagggccattaggctggctatgggttgctttgcctgcttttagcccacttaatacacagtttaatttccgatccacgcctcgggtgcctgatgcgtcacacagcctcaggctatgatctctctgttcagagacaatactgagctttaggtgatctgtccctggggtttcggggacagaaattaactagaggtggcgagtggtgactcaacagccatttcaggtacttttcactgaatcaccctggagccaaatgcttccagaatcccagccaggcagggatggcaccgtgacaactcttggcccactgggaaagccaagaggtctctaatttttttttctcaattgatcattcactggggaaaaagaaaaaataagtattgagcaatgcttttcagggcccatcctactgtggcccatcttaaagtcatccaggaactacctctgcaattttcagtcactgggacctgccctgacctaatatgacatcatccccagaggtagaaggaaggagtccattttaataagctccctcaggattctaagattgtgccctgaagtttggagaaccgctgttccacatgactgtaattgccaagcactgggcaaagagacacagcctggagagtgggagagggctgaaggggagacactctgcctccagcctgtgcttcccaccaggtgggtttccatgactccgtgcattgtccactgtctgtctgttatacagtgattgacaaagagtggcctctgattttaatttagggacttgagtcccaatgggaaggcaagtcatgtgaagggaaatacacaaatccatataaccataagacaaaggaaatatcacaagtggctgggagagagatgctcagggctctctgggaggaccaatgggtgtggctgacctaaaaggagcttctgaaaagcctgtatagacttggcctatttagtgtgagggccagggaacaaggagatctagtgatagtgagttgtactgtatggcaaaggtgacagagctcttggtgttccatgggggaacattgtttttctaagaggcactgggatgctagtttatattcttaatgttttaaagggataacttgaaaactgatatcacgaggttggtagttgtgtgtggaaggtctggaagtactaactttctttcacctaccatctccttgatttctctgtaattcttgtatactgacaacagtatgtggagtttgctggtttgagcctcctcaattttacatgttacagctagacatcagttttgttctcagttccagccagtgtaccttgttttccccctgatttcatttcagcctctttcaaagaggaggtagggttagactggaacgtcttttttctcaggttctaaggattcccccttagctgctggagaagagttttgaagggttcctgagaacctctcaccgttgtctagccaccaaataaaacgggatgttctacactcaaagaggcagggaactgaattaactccaaggaaaggaattttatgaaaaagaccattgagaacagttcagctgaacatcagtataggaatatgtctgatgctctgggaatgcacagtagtcaagagaaagaaaagaagccataattataaacatggccagagaggacctagaaggccttctatctttcctccccttcagctgtacttgggttctgtttactttgaaatgaaagactgaggcaggaacctttcatacttgtgttaagtggtcttcatcagccagaacagaccagactaatctccacagcctctggggttggagagaagatggtttatttttctgtcccctgtggcactatccttatctctttgtttcccttcctcccccttcctgccccccccccccaattatcaccaagatactggtccttgctctagaccagggacttacccactgagatccatgagcaatcttgattagcatctttaaaattccttttaaatcattttagtgtgtattaattgtacaaagaagtgatttccatcatggtgtttcctacacgtacataatacattttcatattttgtctttgttttgaatttttttcttcttgagaacgtcacacgagtaaacagaagaatatgatcatatatggttcttacttcacctcttcagcccctcctcatgtcccttttagggtatgaaaatcttatcagtagccacatccccagaaaagaatgatgttccctctcctagaaagcatcagttgccaacctctcctagagctgccaaaagctcttaagtaagaagtggagcctggatatcatctaccctctctgtgccagaattttgtctggcttgttgtcataagggtcttgtttaggtaatcacagttgctgggaggttgtgagtgtgatagccatgtcgaatccagaagatagcatttcaaggtatgtctccctagcctttgactctcaccttctttctggctccctttccaagacattccctgagccttggtggaggggaaacaggactagcaggctttctattggagtcttgtttaggaatcagtgctcagtcttttgtttgtagtactctgaccagttgtaaggccccctattgacacatccttgaatcaaggcccattgatcatacgttctaccaaaaaattctacagggaaggagaaaaggacatcctattttaggggttatatctcaggcttcctgaattctaaaatctttgactatggacaacaacactgtagaactgaggaaatgtaaaattaaggaaaaaaaatctaatttgaaaagttgcacatgatctgtgtgcttgagaccacatgtcacatttagaggccacctgtggtgagctggcttaatttgcttttggttcagactatggagtaaaagctgcctcggccatcagctctgcatccctttgaactttgtggaaatgtgctgttgattcagaaagcttttgatctgtattagctcatcgttcttaaaaaacaaaacaaaacaaaaaaccaaacttaaacttgtgtgcttacctaaagaggtgtgagtgatcccaccattaatattctacatgattcaagattttatttcaatactgtgaagcaaaataaaatacaggaatcaagagggtgccaaggctgattcaagactgcagtgttttttttctgtcacccctgcttctagttttcatcttcccataaacaacctccattttttaaagtgatattaaacaaatatctacacgatgggtccattttgtgaaatgcatataatgcatttatccctaagatgttcacctttgtgagttttatgtattgctattatgacgatgatcttgttagaaatgatgtccgatactaaaggtggaatgacagatgggccctggtcccacctccgctcccttatgacttgggaggctgctaaaagttgtgcttttgtctccttatctatgaagtgagaatcatcttgatcctccccgaatagagttgtgtgatgattaagtgagataatatggatattgctttttacacatcctgactcataataacaccatagcctctgatattattaaatatttttttaaaaacaccatgtagagtagacaagcaaacatttctttccacagcctacttttcacatttcctgatcctcacaggctcttcctgtctctgagtcttgccacttcataccttccatttgcattacctgccagccttgcttcccctttctttgcattcctgagatgctggatttccttgcaaagctctggggtacttcctccactgagtgtttactggctgtgggttgggaggtcagaaagagatctttcctctaagctcttctctcagatctgaaggccagtggcctgcatctggtactttcctggaactgccatatttactcgtcatcttttaggtatctgtgtccccctccctgtgtaaatgctctgccttccagcatcagcacctcaccctaggcatggcttaatggtaagcatccactgatgagcactgtagactcatccaaggcatacctgtgcagcctggctctgtgttcagacaggtcagccccaccaggatggagatgcatcagcactccactgctctctgtcctcacaccagctcagctccctcctgtggctggtaaaagggaaaaaaatatccggagaaaagtaggggaaaggtaatttgttttagtgtttacagagggcttgtgtataattagcagttcatttctgtaacacagttggcctccttggctcggaacctggctcttaaatactcttaaagggatctatacctaggaaggaaaaaagagggtgccctaggcctggtaatgacatgtgatcaaaagcaacccttcagttgaatatttctcgtttctcccctacccttccttactctcccattctctccatgcacccccttcccttctcattccctcctcctcctccccttccccttccccttctcttcttcctcttccatactcttcctcttgacttggaccatttaccagttccattttcacatatgctcacattggcttgggatgctgtggacacgattgctgcttgctgcctgccttcctgtcatgagccccatgaagaccagccaaatattcactctctctttctaagtatcaaatagatgaatacacaaatgtgcacctgtcttttcattatactatgggggcaatatgcctgctgttctaccctagagcaattttacggcaattatgtgagatataccatacaaatgtacttaccaaaacgaattcatctatcaatatgtgaatgctctttgcatgactttttactcatgtgccaggcacaagctggtttgctgagtgagtagattttttttttcttttctctaccttattcaagaaaggcatttcgttagatcaggggcaaacacaacaaaccctcttcctattttctgttccccactgtgttggccaagtctctggtccgtgtctgaagtgctctcttgccctgggcttctgctggggaatacagtttgttcctcatattatccacgtatggaaaacaacaacaacagcaacaacaacaacccacttctggtgtaaaaatggctccagaatgcatgctagagtcttcactagttcttgcaacttgcatgtgctctgagtagctgggggcacagtgaccctgcagctgcttccggtctccagtgctttaggactctttcctgtcaatagctgctgaggcagatttgggttcccgtgcagcagtgtccctggggagctctgttgagcctgtgatgagatctttacaagcctgacagactgagaaaagagtggctacatagatgttcacaaaattacatttgttcaacatgaagttgaattaaagaaattcttttgacattgaaatcatgttttgacatgataaaaaccaaaaaaaaaagaaaaaaagaaaaacaaacaaacaaacaaaacaaaacaaaaaaccaatctaacctgtggtcatcccagtttcttccaattttttaacaattctttgatctttgaaaactaaaaataaatattttgctaacacaaattatgttcctatggtaaatcaatatgatctatttatgtaattataccaatataaataattaacttgtaaatgaatatagctattagctgcttgatacccacggtttcttttctgttctaatgacactgaaggttttgtgtgtatgtgtgtgtgtgtgtgtgtgtgtgtgttttgaggtctaatagtcacttctatgacttgtcaccaaatgagtatcttagggaactgatatggctgagctgactggtgaattcattaaggaatgtggtaatgttaggcattgagctacactgagcacatccatgttggctcccaggttttatttctttaccatttctgtctcctttgatgactttaggcaagccatttgacctgtaatagtcattttcctctactgtgagtttgactatagattcagtacttagttctcaaagtggctttcagtaactagataaaaatatggaggagctctttgtgaaccagataatgctccatggatgtaagctgtcatgaaaataacataagattataagcatacgtgttaatctctattattgagatttataaagaagatgttccacacattatcttctaacatgttttgacagatatggtcagagaggtcccttggaaataaaggtaaaatgtatacccagaatattattagtatcattctcctttctttgtgtacaaaaccttaaaatatcatgaccttttttgatcatttcattgataatataaaacaaagctgcaatagaatagttttataaaaaacacgtttctcagtgattagagacaaaagtaagtgtagtagcttgggttccttcccatgggactccatgtacatctgaatgatcatggtatgtaccccacatgcctttgagggtatctcttctatcatcagagctatcatcagcttccttaacaatatggaagcaaaggcagaattaaaagggcatgaggcatgctacacctcttgtgtgcacaggttcaagacattgatagtacatgtcccccgaaaatgaaccatgctggaagagtcagttaggttgctgtatctgtcgacagcttccctttccctttctctgtgtttccattctggcttctgtcatcttctttcctctctagttgacaggctggttgtccttatcagatggctttgggatggtaggacagccccctaggagtgtgctccagggtcaagctatgaaggaacagcagcaagatatccatgattagatcactgtgatactctctttgcggagagtttttatggttcccagcacttcaaatcccattgcctaaatgtcagtagtctggtgacacagcctatagcccttgctattctatagagatgttactatgagcaccccaacccccattgcatcatatgtccaggaaaggttgccacagagcttaattgctggtgtttatttagtctacgtgtgcttgagtgtgacagagtgagagaggggtacagacctgtcttttgtacccatgttatttattgcatttttgtcttacgacttccatttagagctaacgaagctgcaaagtaggttatttaagctgaatctcgggtgggtgctgttagcaagtggagaagtgggtggcaaagagagagaaagatgggagaccgagctgaagagattcacacagtgtggtgctttgtcctgcagtactgcaggtcataggcatgctgcagcttgcagctatgagcctctttgtccaagggtaaagactttgtctcaggcacttggaaagaagcctcctgcaggcaggtacacacacgcacacgcacacgcacacgcacacacacacacacacacatacacacacacacatacatacacacacacatacacacacacacacacacacacacatacacacacacatacacacacatacacacacacacacacacacacacacacacacacacacacactagtgtagcactgaaaatcatatgcaacctgaagtgagtgggttttttctcttttctgggaaggaggctccttatttaattaacttcctgcctttcactgcagcatgcaccactacctgttctgatcccatgtgcctgataaagggcagatggaagaggaggaagaatgatgcctttaggtcacagcattgtcacctgtccaaatgccatttcaagagtcttctcttgaaggagtggtcgtcatctcctgcacacagctcaatgtgtgtttgtgcagatgtgcatgtgtacctgtctgtgctcagattctctgtgtgcgtgtgcatgtgggtagcccgttgtcctttctgaaggttttagttgatcgaaaccattcatcagtcgtcttttggttgggtttaatgaagggtctttcatgagcaccagaagtcctgtataggattcccaatacagagctagatgaagtagaaagggagaggataacaaccgaggaagtagaagctcccgattttgtatatgctgggacagtgaatcagtgacatgtgtctgaggttgcgctgtccttggggtagggacctaagtcctcaagaccaaagaaggaggaagactcaggaagaatgacaagtaagaatatagggatagagggccaagggcaggcaggactcctgtggctctctctactcttgtaacaaaggagcagcctggggttgtaaatcatctacgtctcatactcctccttaattaaattcctgttgtaattgggaagagtttccatattctctacagctatggccacctatctctttcattagacccacccagtatttatagcctccttgagatttggaccctctgtggctttacagttgggggtctatacagtagtgaatgggcagttggttttagaggagacaagggagtatgctgtgttttgccaatggtattttgttttccagggctgcagttgtgactctctcagtgggcgaacattccgtctccatcagatatctatgggcctcttttatctcctttcttctcttctcccaggacaaaacatgtacctgagatctctataaacatcagactagaaaaaaatatgagcgataaaagacagaaaaactagagacaggtatgcctaatctattcatctgatacctactgtgtgtatatagtcttgagggtgactttgattagtctttattttataaaccaagtgatccaggtctgttcaaggttttatagctactcagatggagagttttgccttgttgaactagatagccccgtttctttcaattcctccctgcttccatgagttagaacagaattggaaaaagtaggtgatttgaagaggtcagattaatttatgtaccacataccagagtgcttactttgtgactcctgggcctattagctatgggaaggcagaagctcctggtcttgaggagagaagcatgacttgtgttctgtgcctgtcttatcttagtactttgttgcaggtctttgagcatatggaccaagcacaatttgtgttctgtggctgtcttagtactgtgttgaaggcctttaagcatatggaccaagtactgcagggcataaagacagccatgaaatatctttctggagtagtcaggagagactttatggagaaaccttttctaccttcaaagaggtagaaagatcctggttagacagcaatattgttgaagtgttgttggtgaagtgcccaggttatttctaagagacacaagcttatagtagatttcctggttctatggctcttagagtctttctgccccctcttccaccatttttctttgaaccttgggtataggagttatactaaaaatatccattatggtcaggcacccctttgtagttgtactctgcatgttgaccagatttggttttctgtaacagtctctgcttgttgcaaagcaaagtttctttggtgagagttggaagctatacctatctatgggtataagggtaagtatttagaatgtatctgtgaattacagtttactagagtggtaataataagttctcctcttaagatttatgaacacattggtcttgggtagttggctaggtttccagttccaggtatgttttcttacttgctgagaggctaagtcaatgagacagctgttggttaccaccaagacatgagtgccaccattgcacttttagggatagcttgtcatgctggtcattgtagttcatagtcttcacaactgagtaggattattggttgcttctttcctttggtagcttgcatagcacctctgttactatgagaacaagtcctgtgggaggagattttcagttagcttagatcctctgaatcccatgtgtcagaagtgcatggtgtcttcagcggtaggaacttaccttcagtctctgggaggcaataaaaacattgaatgctaatgttaaaggagaaaataaagtcctagagaaagacctataggtaactggagggaggacctctcagatggaggaccaacaatgcaggaacctcaagtagttgtctgagtagtttttggaatggctagaaagacaaggaggctggaggactccaagagacaaaaggagagagggagacagtgggttagagaagagagagctagctcagaccattgtgaggagtttgcatttttgtctttagtgttgaggggagagcagttataaaatccatcatgtgctgaagcttcactctactcgctacatggagagtgcctttggtgaggcacagaaagaagaagaaggcagtgggagaagtaatggaatccgaatggttgtgtaggtggaagagctaagcagatctttacataaggtctgtatagaaggtggtactggggctagagagttggctcaatagttaagagcactgaccactcttccagaggtcctgagttcaattcccagcaaacacatggtggctcacaaccatctgcaatggaatctcatgccctcttctggtgggtctgaagacagctacagtgcactcatgtacataaaataaatagatcttaaaagaagaagtaggaagaggaggagggagaggaggaggtcctggcagctttctattgggtggaaggtgagatagaagagaagggaggatttaaagctcctcagctacattaacatagcacaacaacggtgtctttctctgaagtggaggaactcaaagacaggactgcttgcaggtcaaggctaagaatttgtttggagagaaagttagaaatgcccagtaaccccttacagtcatttgattaaggtacaggagggatatgtgggtctgaggctgagttagaacttgaagtagacatttgagactattcagtttatttatgacagtagagccatgagctcagctgggattctttgaagagaaggtatagataaattgaggaccaagaggctgagctctgatagctacagcattttgttgacaccgttagcaggcctcttagcagaccaggctctaggatcacttttgtggacatgacagagactgatttatcagacattgagccaggtacaggtttgtaacaaagtggtgtggagggagagtctaagtcaatctggtcttggttctttcgttctccataaaattacatagcctctcaaagtgatttttgttggtttgtatgtgtatccatgtgtgtttgtacatacttgcttgtatgtgtacatgcatgtagaactacattgaatatctccctcaatcactctttgacttttatttgaggtgagatctcactatgtattcctggtagcttgaactctctatgtagaccaggctaaccttgaactggtagactttcacctgcttctgtctcttgagcactgagattaaaattatataccgccgtgtctggctcaccaacatatttttcaagacagatgagattcattcagagttctctgggcctgctagatcgctggccagcaagccccagggatcttcctgtctatgcctcctcagcactgggatcaagctgatggtttttaaagctggattcctttcctgctctgagtcattgactctttattacacagtactgagagtatctgcatcatgtatccactcaccactgttcagatctgtaactcactattagacctgtagatatttagttttaagatgacaatgttgtcatctgtttttgtcctgcaccttgcccattaggaatttcttttggcccttccttgagatttacctggaaatcccacacctgttctgatcttcagtggtctaggctaccacagtctctttcctgagttaacgcagtatctccctgattgcacaccacctcacttcagagtgtccccttcgggtgcatgtcagagcatgctacttctgtcccctgaaccctttgatggaggcttgtctggatgcgcaaaagacaacactctgaaagtatctacaggttcctaaaaaccttnnnnnnnnnnnnnnnnnnnnaaatgcccagtaaccccttacagtcatttgattaaggtacaggagggatatgtgggtctgaggctgagttagaacttgaagtagacatttgagactattcagtttatttatgacagtagagccatgagctcagctgggattctttgaagagaaggtatagataaattgaggaccaagaggctgagctctgatagctacagcattttgttgacaccgttagcaggcctcttagcagaccaggctctaggatcacttttgtggacatgacagagactgatttatcagacattgagccaggtacaggtttgtaacaaagtggtgtggagggagagtctaagtcaatctggtcttggttctttcgttctccataaaattacatagcctctcaaagtgatttttgttggtttgtatgtgtatccatgtgtgtttgtacatacttgcttgtatgtgtacatgcatgtagaactacattgaatatctccctcaatcactctttgacttttatttgaggtgagatctcactatgtattcctggtagcttgaactctctatgtagaccaggctaaccttgaactggtagactttcacctgcttctgtctcttgagcactgagattaaaattatatactgccgtgtctggttcaccaacatatttttcaagaacagatgagattcattccagcagttctctgggcctgctagatcgctggccagcaagccccaggggatcttcctgtctatgcctcctcagcactgggatcaagctgatggtttttaaagctggattctttttacctttataactattctgttcattcaccaaatattgattggaggcctggctgtactaggcattgttcctatgcatttcgtgcttttccaaacccatgactcctcctaattcctttcctgctctgagtcattgactctttattacacagtactgagagtatctgcatcatgtatccactcaccactgttcagatctgtaactcactattagacctgtagatatttagttttaagatgacaatgttgtcatctgtttttgtcctgcaccttgcccattaggaatttcttttggcccttccttgagacttacctggaaatcccacacctgttctgatcttcagtggtctaggccaccacagtctctttcctgagttaacacagtatctccctgattgcacaccacctcacttcagagtgtcccgaagatcctggtgcatgtcagagcatgctacttctgtcccctgaaccctttgatggaggcttgtctggatgcgcaaaagacaacactcttgaaagtatctacaggctcctaaaaaccttctagcccatcctctctcattttgttcatctgctctaggcacagtggcctcgttactatagaagacagtaggatttctcctgccctttgaacattgctgggatgtttttccctactatggctagctcactttctccctttgagtcttaaacttgaagtcttccctaaccttactgtatataaagtggatctctttctgtatactttatttttctccagaaagcttaactctatgacagtatatgctttctcctttgattttctttataggctaagccatcccactaactgtaagccttttgaggacagggcttttgtctcatgtactgggcaagtggtttccgttagaaatatcaaggtaattgtttagtaaacatttgctgcatagactaatgacagaacaggaattggtgggctctgttagttattgttatctttgcaccaggctgtctggtgatcagcgaggtacatttatgcaatattgagatgccattagggactggatctgcctctcagagcagtgtttcaattctaggaagccatctagattgggcctacacattaggtgtctttagtatcattaggcaaactgatcaccttggatttggggttctatgactccacaatgggctcttttgaggccatgaacaaaatcaacaaccatttgttaaacatccacagttaaagcatgaaattaacctccttagcagggggatgcgtgtcgggatcaggattctcaagggagccctcctgaggcttcatttaggcttagccctggtgctgtggcaagcctcaaacacttgtacatacggtttgaatctaagcgaacttaaaaccaggaagaaacacttacaagcctcaagaagatagcgaggtctcacttagctccttgggggtgtttagtattctggaaagagcaggttgagggattccagcaaatgcttactgcatccatttgagatgcaaggcgctgttctgataggctacgggcacattttctcaacaacttagggaactggatccttgctttcccacttcacagctgagaaaagaaaggcgtttgctctcagagtctgtgcccttctttattgtgctacaattatctcaaaatgagtgtcattaaaagggctttaggggaagtagaaaagttatttaatatgcttatgtgttacacttggatttgtggagagtcgctgcgcatgaagacaggatttttttttttaagtaagccctgcatgtgcaagcactgcaattagtatttccaggagagaccagtctcccactgctgtgcttccttactggcttcattcgtgacactttcctcataagagagaatgctaaagcaggcctgtctttttgatggagatcccaagggttgtgggagtggtcaggagctatttagcacttctcacctctgatcctctgtactgaagaattctggattgcccaggaatgagtttggttatagaggagccagcttcctgctatctccctcttcttgctattgcctgtgtcctgtgtcctgtgtcatgtgtcttgtgtcctgtgtcctgtgtccctgtgtcctgcaatgtatctggctcaccagcaggtaccagggggaggggaggtcagcttttgcttcagcttagtagcagaagagaaacaatgtggaggtggaactgggtgatcgccctcccactaactgccagtaactctctgctctcctctgaggaggaaagagttgggcagttttctctcctgaaaacactcttgaagaaaggtgtcaagcttggatcaggatgtctggactcatcctgacttaaaaggaaggcccttatgacttccatgaatgaggctcaattgtctactttcaagttcccttgtattctggggccttgtgccaccctctggaaagtctacagacagtgttcttcatggaaaggctcctgttcagaatcatgtagaaatggggccggggttagctgtgtgttttcttggtatcagattggccactaagaagtaggaggaggcggtgtggttggaccagtccctgggggaagtgtctacatcaggcctcaattctctgcagagtgccaggccttactctcatgtaattaggcttttaatgccactttctattgacaagggtgagcagctgccaagtcacttcagatgacattgggttgcctgtcatgattcctgtgggactgcggaagaactgtgcttcctcaataccttgccctacttgaacctgtgccctgatctggttccgcacctcctttggaggaggccattcagagcttctctggtctcttcaggcccgagtctgatccagagatactgcccacatcttggcatagagtttttcagtggaactcagaatgagcctaactcctgaccgagtctaatttgtagaacaaagggagagcagtgaccctacattttcctcctgcttgtcattctgagagtggaggaggaatgggaacttatttgtccatcttccagagagtcaggcactgtagctgatcacttcccctctgtgaacagagataagaaaagcaggccagacatggagctaggaaggaaaagaagagaaaacaaagtaatttccagtgtgcatgcatgccccaaacattcatgcgtttgactatggaggaagcagggagaaataaatgggagtcagcggggagggggagagtgctgagacaaggtgagggctggagagaaggagacatgctccccaaagaggcaaagaaatgacatagaggcaggaaaagaagtggggccggaaagagaagcgctttctgggctcaatctttcaggagtttctactgtgagtcccatccaggcttgaggctgagtggaatatgtggaaatctcaaatccaagagcactacacgcatgcactgtattttctttatgtccctgggcctgggataataacaaccaagagagagacagtaaggaagagaaaagggggtggtggtgatggaggaggtatgaaactttaatcaatgcccagtgctcttaagagttcgggagctgcacagattttattatctatgtggctatttctgtcacctcccagcaatcctcagagcagcaccaggtctggaagatgatgcttgattccatcaccttgggcttccttggtggggaggaggcagtgtacagccatgcaacgacaggatagggtgtgctcttcagcacacagaggggtttggctttcactggagttcatcagagggagatttttgggtctacattggtgtgtttgaatataagcttgagctcatgtaaagatttaaagctccgcctttggctggggacgtagcttgacgatagaatgcttgcgcagtgtaaatgagactccagcttctgttccaagaccaccaatgggctgtgctttacctcttagcaactcccccccacccagcgctctaaagcccacagctgtggggtcatgacaggacaccttctgtctgtcttgatgcttcctcccctctggggctctcctctctcctcacagactttctcccaagggattcctgttgacagtcccttgactattcagtctatacacggatgactcagatttacacttctcacccagaacacttctgagctcccaatttatctgtctaattagctcctcttggcatctgctgtggtatttgtgtttggcctttgtattcacgtgttgggaattgaatccctaaagtcagaggttaatgatacttggggaaagaccaactgggagctgactccattgtgagggcactgtcctaatgagtggactttggattagtgagttatctcaggagtggctttaaaacaaaggcagtaccctttggctcacctgctccatcttaccatgtaacctatgttctaccatgacccagcatgaagacccttaccagatgctgtgcagaagctgatgtcagatttcccaacccccagaacagtgagccatatagataagactgtattcattattttaaaaaaaatgaatttatggtctttaattatatacagaaaacattcaagccagtaccttctaagaacctctctattacgcagttggctggtttgaacccccaagctctcattgtctttcttgggttccaattttcctggtattccactacctaacaccttccttcttccttcctatccagtcttctcacagtatttgcttcccattgtcttagttaaggtttttgttgctgtgaaaagacactatgaccaaggtaactcttataaaggacatttaatttgggctggcctacatataggttcagaggtttagtccattatcatcaaggcaggtaacacggtagtatgcaggcaggtatgacactggaggaggtgagagttctacatcttcatccaaaggaagccaagaacaaactgactttcaagcagctaggaggaaggactctcaaagcccactcccacagtgacacactttctccaacaaggccacacctcctattagtgccactccctaggccaagcaaatcaacatacccatcaacttcaagtctttgggcaccacctctaagatgtacctcagctgtctctctatttctagcatctatctatttatgtatctatctatttatctgtaatctatctatttacacacacacacacacacacacatacacacacacacacacacttttaacttgtttcctggggttcttcaggaccggtctcactaactttctagctgtttctcttagtcctcttcattcaccaccctgcagccagagtgcttgttaaattacagtccccacttcctttgccagtgtcatctataaagccctttgttgggctcctattgcattttcatgataaactgtcattcctaatgtgatccacatgcatgggccaaccatccccctactcccccaagtcatcttgcttgctggctcttgccttcttcttctttgtcctctagccatccaggcttctgttggtgtcaatgtctacttccttaatgtccacaaaaaaagccatggactctagaacctctgctcacatgagtatgtctatggagtcagccttctttcttttgggttgtctcccactcactcatatctgagttaaagtaatatatcctcaggaatacattcctgagggtcctctgctctgaacatgaaccaataaccaaagccagattccctcagagctcacatacctcctcaagttgtctttggtatgcttagcaccatgatacaatccaggtatttgagcaacattgtctttaatgttatttctcctactaaatgaaagttctggggcagccagaccatgcctgtcctgttgactgtgatgcccacagaattcggccccatgcccagcccatgtggaggctgaacacatgactaactttgacctgaaatcctctctgcctgtggctttgattgttgcacaggggcagggaaaaacagggcaggatttcagaagagatatgatacaaaaggtttgcttttaaatgcccccctcccctttcacacagtcttgctctgttttgtggtattattaccagctccgtgttcaggttttccaagtggacttcacatgcttcttgaagactgtagcttaaattttgttctcacatccactatgttctgttttcttgactcctatgtctatgtaaatacctcttggttcctgtcttagcagatataccttcttccctcaccttctcaggactaatactcagaattcccccgggcccaaactgcctggtttatgacagtctaatagctgcatgttcttggtcctggttcctgttctcaagaagcttcagctccctgcaagtgagatcatcagtggtagcaatgccttgccgattgttctgatggcgataatgggttccctatgtcgaacacattgaaaaccatgaagttcattaagcttgtggcaatcaagaaaagattctggcaagtgagaagagctgatcagtcactcctaaagacagtggagatgagagcttcccaagaaggtggaggggttgggatggggatgaaagatagtgtttcagacagggttttggccagctacagaagacaacctcagctgaggtttataacagtagtgtttcactgatggggacaggcatataggaccaacaagcaatgcttaggccccagggcttggctctagcagatgtttgctgagtccaaaggaccaaggtgaaaaactggcctgatcagaacccatgaaggctggaagcaagggaggggctaccacactgttcccagggtcctagtcctaccgggattacatatggaagaaagcagacacggtgcacttttcctcctcctgagggcacctcgtcacagggctgaaaaggttggagtggcaggtgaggtcagcttttctcaggtcttagaggtggagaacgaagcaagaaaggcagaaaccaaacaggcacaggatatccaggagaagaaatagtatgagaactagcagaaaagccagacaatattttggcagtattcgaaacaagtaggaagtgggatttaagatgtatgtggtgatagtcaagccatgaaggccattgccatgctcagatgatcttcagtttgttctgaaggtgtgaggcgctccagccagtgtctctgtaaggagagccagactgtaaggagagcctctggcagggggagctagggaaaaggaagcaactgggatgcggaggtcatgggaattggtatgaggggattgcagcctgtgtcagcatatcgagagtgaaaacagaatgttgtcctctggggcaacctggagaagagttaataacaggtgatgcttgggaatggagtgtgtcattcaccaactctgtgcacagggaacatgagatcctgactgatgcccccaggctgccacttcagggtgagatccctttgtctccttctcttctgttttagtctcaggtcagggtctgtgtgaccagggcttctctgtctttctccatcattgctcatttctagagattcctaccttcctgattctggtcacatattattcagaatcagaaatggaggcttcagagcttactgaggtggtggtgtcttctgtgtccatttttctttttggcccttttgccattggtgagaccaagtaggcagctttgacaacagaggagatggccacacccccaggatctggactgtccacaaaggagttaggattggggagacacagagagtgaactctctgcttcctctctttcctcttagagcctggtatttttcccccttagcacctgaaaaaatattttccacagcagggtcacctcctgccatttctttattgtaatgccaactcttatttaacatctgccaagcacaaaaggtgcagtcagggctctgtggaaacaaagtgaaatactggcagtacccactgggcttagtcctgaaggaagacaaacaggaaaataaacagaaccccaggagtgtggagagagagcagcagtgggggcatgcttgcaggactcctgctgtttggcctcctctttttatttctctcttcttggaaagcctcttactttgagagaggcttctgtccattttgtttccagctaggcccctgagggtgaagtcaagatgctttgaaagaatgtattttgggggaggatgttaaatagaaaacagcctggaaggatgggtgggcttgggatggtgaaacttcctggcactggtcacataccattttttcagacttaggaattctggaaggagactcctgagctccctggggcagcggtctatcaaagagcaaaactgaaagagaagagcagggtggacatttgggtagagcacattggctttggcatggttaagagacctcaaaagcaagctagggagttggagaagcctcttcatatccaggacagttgtatgcgaagacagttgtatgttaagaagatggccaataagccagcataagtcctaataatgtattcatggtatcaataagtgctgtgattgaatctgtcttccttgactaatctcaatgtaaagcttgcaatgaaaccaagagtacataacttgcccaagatccagctatacccatttcaagtgggcaaaaccaggattatccatcaccatagcttgtaggtaaggtgagaaggtctcctaactgggttagagagatgtgtcagccattaagagcactggttacttttccaaggcacctgagttctgttcccagcacccatgacatgacagctcacaatattctgacaccttccttgacttctgtgggcaccagcaacacaatggcagacagatatacatgtaggcaaaagcactcaaacatgtaaaattaaaaaaaaaaaagtcctgagttattgatggagctaagaggaaatgccagcagagagcacatctcccacagcctcccacaggctcctccagtcacagaacacaactcacctccaagattagtcctgaaccaaatgtgaatgaatgtggccagggaagccatatgtagactgccccaaataacatagtccaatgtggaaattgttttgtgtggattcttagtcacagaactaaataaagtcatacgttaagttttttttttaaccaatgcattgtttttcaaatatatttggtagaaaaaaagcaggttgtagccacagcatagggatctctgccataggtttctcaccttaccggatggtgttcttagctcttagcttctagattggtgggaattactggcttattgatattccagaaggttttgtctgacaatcactaagatgtttgttatgttagacactgaagtgggcagtgaatggctattaagactagagatagcacaaggtaacctggctccggatttgcagcattccacctctccagagagttctattgagtcaaccttgtagaacctttagtgacgtgaatgaggcttttttttccccctgagagcttcagtttctatcagaatgtgtcccagtactgtgtccagtggcacagctcaagtattcactagctggctggttggtcagaaaaaccctgggaaagctcagacaaatgtccccaacctgtggcacattttttttgagtaagggacaaagatgatttggcatcactaccatagagcctgcagacctttcttaaggccagccttcatgacacctatctaacaggtctagctaactgattttcccagatgctctctcactggaaaagttgagacctcgtgaccttgattgtttgaggtcttatttggaaacacacagtcagacatctgtcacagcagtggtactctgagggattagccactctccaaaaagacaaatgtggttttgattatctagatacattacacacacacacacacacacacacacacacacacacacacacacatatacacacatacacgcccattggaaaggatgaggagagtgtaggaggaagtgggggaatatgctcagtatacttgtatgattatgtcttagtcagggtctctattcctgcacaaacatcatgaccaagaagcaagctggggaggaaagggtttatttggcttacacttccatgctgctgttcatcaccaaaggaagtcaggactggaactcaagtaggtcagaaagcaggagctgatgcagaggccatggagggatgttccttactagcttgcctcctctggcttgctcagcctgctctcttatagaatccaagactgccagcccagagatggtcccacccacaaggggcccttcccccttgatcactaattgagaaaatgccttacagttgtatctcatggaggcatttcctcaactgaagctcctttctctgtggtaactccagctgtgtcaagttgacacaaaactagccagtacagattatatatacttgcatgacatatgtatgagagcatccttatctatcatagaaccatagatcgtggctgtatatagtcaaacatttttcaaaagaaagctttcctgttgcagtcctcttgttagccttgctgggcatcttagtacttttaagggggctctctcatgaccaccttaacccaccttgaagcagcatgcagattttcatggtttaaattaaaacaccgcagtagctatttctgtcctttctcacatgctagacactatggtgagggctttacagttgtagcgtgttcccacctctcactgtcttgcagtgctaacatcactacccttcctttttagatgacatagctgagatttgcaggttagtagctcgccaaggtcacatacctgctccaaacctcttcccggttccaaaggactgaaggaagataaaatattgtaacttgtgagttgtttaggagcccactgccccggcctgagactgagaacaaagcagaacagcccccaggcatgccagggcagggctgttgttaaggtattcctaagaacatcttgactgtaaagataaaaaggtatgcaaggaccagcagggctatattatctaagtcaacaccatctggccagaacctcccctctgtctattgccccttgatgcagggtaaagtcatacatcaactggttgctatgtgaacaaaaataagcccccggcacacaggaacaaagtcctgatgctctgtgatctttctgttaatgtttgaataagccaatagtgtgtcgctatgctgaattccacacccctaagcccctaaccccataaaaacccctagctttcaagccttgtggctgacatctgttatctcctgtgtgggatacatgtcggtccggagctccgtaattaaacgtcctcatataattacatcaagagatggtccttcgtgattttttgggtgcacgccaaatggggaattgggtgggggtttccccactagatctaacaggacagacctctgtccaaattcctttgcatctttgtgatgctgagcctgagagccaggtgaaaggaagatggaggccaagtgcgtccttggcccagtcttctttccccttatagcctcttgtaagcttccctataaccatcattgtcatgcctctgcctctcagtgccttcccttgcagattattttcattaattaattagttcattcactcatccctccagctgatacctactgcctgtcggctgtgtactaggtactctgtgggtattgccctcagcaaaggctctagtttcagttacttctggatttgcttcatgcaaggccagtgttttctcttggaagtcatttgttctaagaacttaaccacaaggtagataatagacagctttgtcaattgacaaaaattgcaaggcatcagcccacagatggtgaggtgtgcacagcaagtgtacttttattgttaagcaagatgcctgcctctttccttaaggatgctaaagatggggccagggggcatagtgggtgagtccaggcatgacttgaatccacctccaaaagccccatgtctcacttggtgactttgtaaattaaaaaacagcagggtatttaattttatagaaatcagagtccagcccttggtcccatccctacattatggctgagaagagtcaccagggttgtgttatgtctatagttatcctactttgctaagagctgtggtgttgaaagatcctgttagcagatattcataagcccttggatatctagcttgtattgtagtttttaaggtgaagactcttatatctgctcattctaatgtatagtttgctgttgcagtagtggcaatggcaaactatagacaatggtgacagctggtgtactctaaatcaaggctaaaatcttctgaagccctctgtaccaaggtaagagcaaggatagccaagccacctgtggagtcagccccaggacaaggcagtgcactgctaggagaataacacattccaaagtgtggcccttagagaagtgttggctacccagggaagcaggaggaagaagagccccagaagaaagaagtggtggtcaccccaaaccctctcacaaaggggtgctctgtctaaggcctgggcctttggctccctctggagagggagccagctgactctactcctcagcttaatgacactgcccattccaaccatggaacatcctctccttgctctgagcagtgtgctacttacaagttgacttcgatgatggcttgctcttagggttgtgggttaacctgagctagtatgggatttggtatcagtatactcttgtcattagcatactcagtgtgatgtgtctgacttgaaaagcaaaccaactgtcatggctgataaatcagatttttgagtgaaccatgtgccagccccatctgggtctgtgcagaatttactggggaaggtatttcattgggatctttctggggaaatcttctctgcctcacccccaggcctttggcaccactcttcagctgatataccatccagctttatgggtcttctatagcagtggagtagggacttgtccatgtacatagacactatttatcacacttcttgtccacagagacactatagactacagcacctagcaatctatctccatattcagggctttctttttaatgtaattttttattattagttttttgaaaatttcatactatgtattttttatcatagtcacttgctccctcactactccttttatcttttctgggccaaacttggaccccctcaccccctcctttcctctttttctttactattattacatatgtacctatgtgggaactaaagggggtgaggggaaggagggggaagggaagatagcccacgtccggccagagttcctcctatgctctgggcaggtggatgcgggagggctgccagacactttccactctgccctgagtgggcatctaagccactgaccccactcgacagggcatggacaaggggcgcccctgaccgggggccatggcgtgacaccctgtagcctcggggttatgggagagagggcagaagggagagaggttcccacacagaagagagtaagctcagtgggccttgatgaacagagacagtctatggttttagagctttattgtagaaaggcagggggaaagagagaaggtagagagagactggagagaaaggggaaaaggggagagagaagaaaggctagagtaagaggttagagagagagtgtgtgtgtgaggagagagagagtgaggagaggagaggagaggttagattagagtaagagagcaaggtggggccaagcagcccctcttatggtaggctgttatctttactgttgctaggtaactggggaggagtttagcctgaaggtcagaagcttgggacattgtctatatgactgctagccaaacttctcctgtgggggctgagggggcggtaacttcaacaggagccttgagtccaggagatatgagggaactccttctgtcccatgtaggtgaattatcaccaccgggttccagggttcagctctcaacttgactggaaaccagactgtctttgcatagcccaatgccccacatacctatgtgcatattaatatttaaatgcaacttgctgagtccagttagtattgtttatatgtatatgccttgagtgtcgaccacttggtattggacaaccaattaagggactgtcccatgtccatgctgccatgtcaactagtgtcattgtttgggtcttgtttaggaaaccatactgttgcaatgtcatatatgtagcttccttatcataaataaaaggcactacttataccagacatcctggtcttctggcttttacactctgcgccctcttctgtgatgttccctgaaacattggtgtaagcattctactttagatggaaggggctgggcaccccacaggcagttgtttccttcactttgaccagttgtggctttctgtaattacctctatctactatagaaatgtgtttctttggtgaagggtataagctctatttatttgtggatataaggatgtatatttagagtgtagttaggaattgtactggtttgggtcagtgtgtattacattttcctctaggtcatatgacctcatcagccatgggtagttggctaggcttacagcagcaggcatgaattcctccctctaattgaccctaagtccaaccagacagtagttggtagcaaccaggattaagtgccactactgtaccattggggatatcctgccaagctgataattgttgtggttcattggtatcacaagtgggtaggaacactgattgcttttctcccttggaaacttgcatagcacctttagctactatgagagctagcccttaggtaggagtctcccagtctgttcaatctcagtttctctaagtcatatgtatgaagagtggtgtcttcagcagtaggaacctacctttaacctctgggaagtgaccgatggcaagcaacagctttatatttgctatgcacactcaagacagcctacaaattttgctcactgtcttacccccaggtcatgatggcattctcctgttttattatttatgagttttattgatttcttttgcatgtgtatgtagtgcatgcatgtgtatatgtatgcatgttcaaccacaggtgtgtagttatacaagtgtgtgtgtgtgtgtgtgtgtgtgtgtgtgtgtgtgtgtgtctggaggtttgaggttgacatcatgtgtctttctcaatcactctccatctcacagaggcagagtctctctgcagctgggttctgccttcaggctattcaggtactgtaggcaccagactggaatgaaaggcatgaagcctgtctggacagggtgggtctacaaaaacttggttggccagagtgcaggggagaagtaaacctctgcaagatgttttttggtgttgcagccctctttttttcaggggtaataagggttatataaaccttggggaatggatagggtttctaagggtgaatgtacatcattggttggtactgagatgatgagaatgcttcatttgcatgaggaggaattccatgtgcttgttggacatgactggtatatgactaacataatggtggtagaggtggggccttgggggaagggggaagcaataataccaggacatgaactggaacatgcagacccaaagcagggacggggtgatccttactcctactggttcccacatctctcatttaaatgcacaactttccaatagaactagtcaactgagaaagcatgctctggaaattgtctgtctctgccttctagtgctggaattacaggtcactgccatgcccagttggcctttacgtgggccctggagatctgaactctgggcctcatggttgcctggcaggtgctttgcctactgagccatctccccagcccttcattatatttaatatttagttttcaatctaactggagttgatttttttcatgcatgtcaaaattatatgagttaaattttatttttccccaaagacatccagttaacctggaattattcattggcagtgcctttctctgtgctcttacttacctgtatcctaagtcaagcctgtttataggtcctgttatcctccactgtgactttgcttttgttttaccttgcaccagatgtcatactttctttaaaacacaaacaaacaaacattttataagatttatgcatttcattttatgtgtgagtgtttttcctgcatgtatgtatatgtacagcatgcataattggtgccttgggggtcagaagagggcataagatcccctggaactagagttaatgatgcttactaaccatcatgtgagtgctgggaattgaaccctgcctggtcttctacaagagcacgaggtactcttaatcactgagccatctctccccacctctagtttcttaataactttataataagctttatatgtgatgatgcaattccttcaaactgaccatatttgccttgattatataatttttgttctcagcatttacacacatatattctagaattaattggtcattttttactaaactccagatggaattttaactaggactccattgaattggtagattaccagagagaattgacatcctgtaacatgttgccatttttatgtttcctctgagtctgattaatttactattaaaagtcacttttgatgctataataattggtattattctaaagttacatttttctaatacttttttagcatataaatgtacaagttaatttttttccattttttattaggtatttagctcatttacatttccaatgctataccaaaagtcccccatacccacccacccccactcccctacccacccacttcccctttttggccctggcgttcccctgtactggggcatataaagtttgcgtgtccaatgggcctctctttccagtgatggccgactaggccatcttttgatacatatgcagctagagtcaagagctccggggtactggttagttcataatgttgttccacctatagggttgcagatccctttagctccttgggtactttctctagctcctccattgggagccctgtgatccatccattagttgactgtgagcatccacttctgtgtttgctaggccccggcatagtctcacaagagacagttacatctgggtcctttcgataaaatcttgctagtatatgcaatggtgtcagcgtttggatgctgattattgggtggatccctggatatggcagtctctacatggtccatcctttcatctcagctccaaactttgtctctgtaactccttccatgggtgttttgttcccacttctaaggaggggcatagtgtccacacttcagtcttcatttttcttgagtttcatgtgtttaggaaattgtatcttatatcttgggtatcctaggttttgggctaatatccacttatcagtgagtacatattgtgtgagttcctttgtgaatgtgttatctcactcaggatgatgccctccaggtccatccatttggctaggaatttcataaattcattctttttaatagctgagtagtattccattgtgtagatgtaccacattttctgtatccattcctctgttgaggggcatctgggttctttccagcttctggctattataaataaggctgctatgaacatagtggagcatgtgaagttaattttgtatattgaagttgtactaggctctcttgattatctaaccaattttaatagcctatctaaagatctttttgaattttatttcatgtgcacttctatacttctcccctgtgctattatactagctaagacttcaagtatagattgaaaagaaggaataataatctcctacccaaaatctagggtggaaaaacttccacactgttgttattatgcatgaagtttgctataagttttccatggttacatttctgagacaattcttaagtgactaattttatttttctgtgctgcagttgaactcaggatcaagcataggctaggctagtgctctaccattgaactatctccttagcccactgtttcttgattcagggtctcaccacgtagctgatgccagccttgaactcactatctggctcaggaggtcctggaacttgtgatcttcctgcctcatccttcaaaggactagagtaacaacactatgaattgcttcaaagttttcttgatgaacagagatgaactatactaacttattattttgtatctattatagtaataacacaaaatttatcctatacttttgaaaaagtgaattacactgattttctaatgttaaagtggaaactttgggccaatgccagctttattgtgatgttcttttcctgtataagtggtcttgattatttagtataatgttacatctgtgctcaatagaaaatgacctgtgattttccctttatgcagtagtcttggtcaaggtttaatgttaaagataaattagagagtcttcttttactactcttgaagattttgtaaaattcagatattcctacctaagaattcatttatggagccatttggtgtcccgtcccgcgggattcagttatttgtgggtgcgagggggacacaaacctggaaggaaatgggaggaagggaaggagaagcagagaccaggaagggtgcctatcaaggtctcgtttattaggctgaggtgccttgattttaaagcatacatcgcggggtgtaggggaggggtcgagggggaattttacaaagaagtgggcatctgctgacatgagggccgaagttaggcgccaggcagagggcactctgcatcttatctcgggaacatagatcctccttgacagccttgggtgtcaggccgggctcaggcgtaactcatgtccttggatggcatgggagttcaggaagagatagggaagaggggactataattcagcttttacagcctcaggttccaggaagggaatagggaggagggagtgataaccagctcccagcacgaggccatttggcctgttagggagattgtgaagggctcggtttctcacgggatggtctctgacgatttggcattgtgggttttgtagaaaaatatttatgtgtatgtacgcacatgtgtgtgtgagtacagagaggccagcggttggtgtcatatgacttccttgagctcattccaccttatgtattgactcagagcctattgctgaatgcagagatcatacaattagcaagtgtgactagccagcttaactaaccaggagtaggggaggagaagatagcctcctgcctctgccttctgtgccttgagattagaagtaggctgccttgtctagctttttaatgtatcttattgggttctgaactctgaacattaccattgtgtagtgagttcttttctgttgagccatgtcttcagcctaattatttcttcttaatttttaaactttgttgcatatgactatgtataatattcccccttatttcaggatctcttagtttttaagattatatctgcttatctttgctttctgtcttttttattagtcttccttgaagttgatcaagtttattaatcctttatttccctggttgtagatttattttcatttctattcaggttctttatatttcttccaaatttggggctcttaatatgctattctgttttagcttttcaacatttttacgtatatatttattctaagcatctttttttataacgtggactctttggtgtctactataattgttgtatctgaaatggtggtacctggcaccccttaagtgtttggccaagtaacaatgaatgaatgtgtgaatgaatgccaaggagagagctaggatgttcagtttgttcagcaacaagctaactgctgcagaaccctttgagtctctgtgctctcttcgcagaatgtggcaggcagtttcatgcttgtctttttcatgccaacccccctaggaggacctttggtttctttccccactcccatcactcctaattacagcagcagcaagaatctcatgttctctgccagcatctaaagggcccttccttgtcaatgttctcccaaggaaagatcgcctcccacacctctctccattacaaaagagcccaaatgactctgggtattttaaggggtacaacgttgtgacagtgacaggctgatgtggcatcagcacaatgactccgttggatgtgccattatggcttttcatgtcatttgggtgactgctgctttgtccacatttagctaggtgagtcccagagccaagggagtttattttcagtgtgggaagaaaggctttttggatctgcatggcttgccctcccctctctctgtatgtaagactccaaacttcacatagcttcccctgtagcttaaaaagcacaaggctataagagtgagtccctatacagcaataaattttaattttactgatgaaccaactatgaactggaaatgtgtgcatacaaacttataaggatacatgcatggggagggcagatgaaccagagagagagatgttcttgaaaagaagtagatagataccaaagaagggtgacagtggatatttcagatgacactcagaatggtaggagggactttgcaaagtcatttgattataaccctctgtctttgtctagatgaaaaatccccagacatttattattgacaacatagagatattttgaagtatttaattatctgaggaaggagttaaaatctgattctaatagcttctgaacttcaaagcccaataattctatttaccttgatgactgctgtattttaaggacttaattctctacctagtacattgtgtgtgctcaataaatatttgctaagtgaaaactacacacatacctactgctagtaaatgttcccttacagttattctcctcagggcatctggctaacctgtcactttagtaattcttacaaatattattattattattatcaataatttgattggcagatagacagatatatacattgagtggctttagatttatgaagtgagagttcaagtatttgttatgcatcacacactggcacagttactgcaaatgtagcagggagcaaagtcactaaaatccttgctttcatgagacttacatttcaaattatgtcaacaccacgataagtaagtaatgtattcctagatgtatccccgagggggtgaaaggagaaaaagtgggaactggttctctccttccatcttgtgggtcctgatggactgatcttagtcttagaagcaagtgagcttgctgagccacgtctgtgtaccatgatggtatctttttaatttgatcgttaagatgggttttatagagacgttcactttatgatgttttatattcatttattcattcatccattgtgtgtgtgtatgttggtgtgcacttgtcacattacatgtgtggaggtcacagaataacatataggatattatacaggccctgagactgaactcagtttgtcaaggatttgtggcaaggaccactagctgctgagcctacttgcaggcccaagaagttcacttttgaacaaatccttaaagtaagaaactaagcatgtgcatgcatgcaaacaaaggttctaaaaggaaacaacaagtttggaagccccaaagaggggagtgcatctgggaggggacaggaaagagctggagagcagcatggatacagttcatagacaatcagagccaggttgggtggaatcctgcaggttatgatgagactgactcttagcctttagagaggatcacaacccacagtgcttcatctcacacttccataggctcaccctggctgctatggtgagaagagactacatgagggccaagctggaaccaagcaacactttgggagagaactgcagaaataaacatgggagatggtggttgctgacttaggggtggcaatggtgtgggtggtaacggagtgaaattctggtgagattttatagatttatcaatgggcctgaagtgagatgtaagagatgaagatactggagaaccaaaagtgttctgaaagttttaccatgagaaattattaaggtggcattgtaactaaactagggagaagaccatttgtaaagtgcaataatgaactcattaagttctaggcatactgactttgatgtagctagtggatgtccacgcaggatattaagtagggaactatgtatgtgattctggagttaagggtagagattatggcaggatgtgagtgtgtgtatgtgttctgttttttttttgtctgtgtatatgaaagtagatatgtaaatatatatgtatatatgtatgtacataaagggtatacagcttctcaatagcttttaagactatgacaatcaaagacaatcaaagctgatgttaagactctcttggtatatgttccatagatattccctccttaaaggctgtatataggttcaggagctctactgtagcagccacacactacaaagcttgagttaattctgcagatgaacccgcagagaggagggtgcatctgtatgactcccattacctgagtgcagctttgtgtgtccagtcatctctgctatcatcctccctgtgaaggggaggacatcctgaccctggatattacaaatactcaggtcagctcacctggataatgtcatttcaccacactgacaccttcttccacatgttgaggtatgggacacggtctgcagatgaattcactttccatttttctgatggctcattcatctcgaggtgagatttagaggtagaagtgatcaatggacaggaggtaaatcaaagcatgcttaggaatggccaccaatcaagaagccttgaaatcccgaacacagcttctctcaacatgtcagagatgttctcttccaaggattcctaaaaagactgtactttcacagtgctacagtgggtgtcacggatgcagagagggagaagatttggttggttcctgtaaaggacttgtctaatagcatgaataataattgaagatggaaggtagaaaagagtagcatgggttggggttgtagctcatgtggtagagtatttgccgagcttgcatggggccttgagttcagtggatttccaactcttcatactggttacagtggcataagcttgtaaccccagcatctaggaggtagaaagaagtggattagaaaggtcatcctctgctacaaagaaagtttaaacttgcaagcctggactatatgatacctgtctcaaagggtagaggaatgatgtggttaacatatgttactgggtaatcagatagcaaattccttgaggctatggagtcagagaatggatattaaaacagaagatagggcttgagctggcccttgagaaatggagaaacttaaataagatgggacatgttggtttctttatgtagttgtgtagttcatacatacataactataaatcatactacttttatatcatatcctatctacattgtcagccttcatttactggagggatgacctaggtgggaaagaccatggataagattaagaggtggaactatatatcaatactttgatctagtcaaatatatacctcctcattcagcaaatgaagtgtacactaattgggaaggccacaatgaatacagtaggacatttatgcagaaaagtggtgacaacagtatatgggttcatgtcacatgtacagccttagatgtcaagtcaactttagacttttatcctgtgggcaatcagtagctatagtgttttcagaaaatgtttgaattctctgtaagtaatgatctgtaagatgtcttgacagcagtgtctaaggaggcccgggctatgaaatgatttatggtagaaatgcaaacacaaaatttggccaggaaaagagtaaggaatgttctcaaggagttaacagggagacatggaattgtttctaagtagagatccacaggttgtctagcatatcagccacatgcttgacacaggcattcactgcctccatagtcctggaaggggtgcagaaaaaaagggagacgtcagctgtctccattatccatctttttctgtttccctgtctcattcttgctgttgcctgtctgtgaatattaagtgcctgtccacacttcaagtgagctcactaataaggaggtcagacctcagataagtagaacaagatgcagtgagtccactcagtaatggtcaagacatctatcattggtggagatcattaatggcttaaaacatgaccatatattgttaaacttgactttctttataatcctataaaactggtatcaccatctcctctttgtgaggagggagctgagatgcagggaggctgaagggcttgtcttgggacttagaaatggcaagacacatcttgagctcatccgtggagctgagatgttggcttatcatctcttatgttgccttgggatatgtttcatggatttttctctgtgatgagcagacatcctgcagagcatataggtgagacagtactgattggaggagaggcaggctttctccattgcttggtctgtttttcaagggggtaagccttgaaatttgcctaaacatttgtcaatgtcaggctcaagtttgatgcaagcacacaaaggggtcttctattcacaggggtaactctgttatctgtgaagagggtcatgcctattccagctgtgggcacattaccttttcagggtagatgctattaacagatcacataaggccatgatatccaatatgggcctttctttccttagtgcctagaagggtttgatcataattacagtgtcactgaatagcaggaaggatagctctactcctctctcattggtccttgcttaactagggctacctgaaactgcatcagctcatctttggcactgacccattaaagctacctcatgcttcttgctaccactatagggaacattggcatatatgatgctagtttctccatttgctaaggactaagactcttacagttacttggaactctgggaaggccatctttgcctaggcaggggactattctctctgagtcagagatggagcctttcctgaacatgaaggtgaagtgaaactagacaaagtgatgtatattaatgtactagggttgccttaaccaaacacacagactatgtagcttaaataacagattcattttgacccaattctggaagctacaattcctgtattgtagcttccatatccaccaatccatccatccatacatccatccatccatccatccatccatccatccatccatccaataaactgaagtctcatcagcatccttgagggtgatctccttggctttcagatggcagatttctcactatgtctgctcatagcatatcctctgtgcatatatatccctagtacgcaacatgtattgaagttgcccctataaggacactaatcagattaatgacaaatgatatcatttcactttaataacccatttaaaggtcactttccacacgcaatcacatgctgagttactgggattaaagctctgacatgaattggatagagagatacaatgcagcccctaacagtagggaaagttctcacctcagtccttgcttcttctcttgtcctcactccatccaacccttccctcttttccttcacaacaggctggatccagagaacaaagggctggtgtctagagtggttgcttagaaataccttgacagcccactcatgatcaggagcgtttgctccaaggcacctgccagcagcattcaacccccgcattgggaccccctgtggtgcaggagactttccagttttatgtattgaactaattaggaaaagaaaataaaattctcccaaaacaacacttttttaaaaaaaaaatcaaatcagatactgcaaatagggcatgattactgatcctcacctgcatgatgaaagttcataggtcattcaacaaactctacccgtcccactcccactttcccacactgcccttcagctgaaatcatcactgtctctaaggtattctgcttagctaacttgggccacaataaactctctcctttccaaaacttctataatatctaacatatatagctcctagctgatatgcattatatggtactttggagcatatatttatatatccatccatccatccatccatccatccatccatccatccatctattcatccatccatccatccatccatccatccatccacccatccatccacccatccatccacccatccatccatccaataaactaaagccttcagggaagaggaccacccattcctcatctaagttttgtctgcttgaagtcacagagaggcaccaagtaggtccgtcatgtttgctgaatgactgagtaattaacaggtttatctgaagatggacgattcattggactcacaagctagaaattccttttaatttaataaggcacttaataggtcatcatgtagattttgtagattatggcctttgaaaaactttgaaatgtagcaaaaataattttatctgcctcggatatgtgaaataaacaaagccctagacccatattaggcttttgcttcctccttgccctcctgggcatcttcaccttaggggttactcaggctctttcatgatctctcaccatttgtaagatgagaggataaactcttagatgccaggtgattttcacttcggcttcagttttcagagagtggaggtaggtatctagagaagggttctgaagccatgctggacccttctatgaggagtatcaggaatgatgaatcatggcaaccaagggacaggaggagggacaggtggcatatgtagacatcttctctgaggtcacactcagcaataaagctctctgaatttatgattcataagaaccctaaagaaacttgtggggccctatagtcatcagcaagaacatttgtgaacattgtaagtaggagtgctcattagcagagatttctggtcaaccaaatgctggctgagtacgtattatgtgacttgatctaaattcaggaaaatgtgccctgggcgtaggacttccatacataaatttgtttaattgcattgatgtaaaatgtgcaattaagagggtaatgagggtggttgtcacccatggtggttgtgggaaatttttactttcctgtttatacttctctgtacttttcaaatgctcgtgtgctatttttataattagaagaaaagaaaaagactgattgatcacccaatcgggggttaagaaaaaaatgaaacctgaaaacttcaaaactggcttctgctcaccttagtaaacatgtgtccgtgtcaatcaacaaacattcattacttacactatcatgagtgcttgagggtgacgagggactgagtcaagatggaatgctgttcacaggaaaagttgtttcatagaaagcaaagattttgacctagaccttggtagagaaggctaacaatttgcataccagggtaagtgggcatctcagggagagtatagacctgtacctgaagggaacagtgtgctgggaagagcaggaagagcgggggagccatacaagatagaccccattgaggagattcagcaacagattggatccagattgatgggctatggtccctaagtgctactgattcctcgtgagggtaaggatagctgccactaactccatttccaaatggagccacccactgaagggccctgagtagaagggcagactcactggctgcagtgggttctgggggctaatgaggctgacacagtatttcaggctattgcagggacgctgtctggatatcctagatctattttagatggggatgccactgagtcctgtgcttttctctagtgttcttgattcttaccactcaaggaaaccagggtttcagttatgtcagtaacatattttcttggtgggcaaggctaaggcttgtgaaacttggagttgtgatcatagcttttatgtcatgtctccatctacctctgttttctctgtctgactttctcccatcccatgctattagccttaggttcacatttgatttaatagtcaaaacaattaaatattatcaagttggttcctggatttattccataatgtaatagggtagcctttttaaaaacaaaaacaaaaacaaaacaatggtgtcagctaagtcagattcttttagcagagaaacctggaaactgttggaggtggaggaatagggtagactacaggtgcctggatgtcagtaagctttgagctctaaacagctttatacaaaactcaacggtctcttagtaggtgctatgctcatctcccgagctagcaataattagagaggcctcatagtagttttctacttatgcactgtcaggtggagcaagccccagagtatagaaagcttcagggagtttatgaagccccaaaggaagggtctagaacagaaatggtgggtccatttcaaaacaaggccagattgcctgttttcctttcctgctttaaacaaacaagcaagcaaacaacaacaacaacagcagtctgtggtctatgtgacctggccctggatggcctagtcttaccaatgtagcccttatgtcagtcttgtatttataacaacccttctgtctctgcctcctgagtactggaattataggcatgttttactgagcccagcttcagaatgtcattcctttatgaaaaaaaaattaaatcctccttcccaggagctcattgtcagcagccttgtttgtagtcttattatgaattcaaaaatatgtcacatctggaagatctgtgcttgaagtgtgaatgctatcacaggaatctttttttttccttttaatcataggaaagtcttttaggtggggtgttattgtcaagactaagttggagaaaattgtctgcagttagggctaaatgacagtgatcattccacaactcatctagagcttgaaaaatgaatatttagatttttgtattggacagaaaccatttgtcccagaataaaatatggtagctggagaatggcagcctgcagccctgatgtgtgggcgagcctttctttatgaaccaggcatattctggagatcccatgtgtcagtcaggtttttgtaaatggaatcttttctttttccttccttaacttgccctgtaatttcggcagtatttaatgttcatccctgatttatcttgagttggtagttagctgctaacattcgactctggatctgagtacttcttctttgctttcttcacttttattctttgctcttttcaacagatgcttagggaatagatgctatgtgccaggtacagttataggtgtcgggaatatgaataaggatgatggggtaaataattggtgtaggagacagtgaaccccaatcctgtgggtacagtgcagctgtcacggcacagaacccctcagtctggggttgggcaggagaatttcctgggctgagaactgaaccatccaagggtatgaggaagaacatgcttggaggatgcccgcttaaagaccagcatcagagacatggttgaggctggttttctagaacattgttttggtgctggtaagaaaagggaagcagttgatgacctaggcttagcttctctgtggaggagaggtgaacagttcagcttttattaacctgacggggttgggaaggaacggcgggtgatttctctcttttatttttttttcctgtgatcattttatagtatgagctgtcttcaagaggatacacccaaatacgatgaagactgatgagagcataagtatatccacttccaatgggagctctaattgttgtctagtcttttaaaagaaatatttacatagaaattacactttttcccctaaggtaaagacatagtgtcaagagataattgatagattaaggggaaaatggtatgtaatacaaagtgctatataatcttatacaaagaggttcttcaaatgtattagaaaagatcacctggaacattggagatgactcccttgataaagtgcttgctatggaaggacaaggacctgaacttgatccccgcacccatgaaagctgggcatagtggcagcacccacataaacccctgtgctaaagaggagacaggaggatctccggggctcactgctggcttctcttagtacattctgggagctctccagattcagtgagagagagagtgtgtttaaaaaaaagaaaaaccataccagcctgagtttgatcattttaaccagttgccatgaattgcatctgtagttccagtacttctgtggggaaacaaaaagcagggacaaaggaattgtccagaagcccaagagcccgataggttggagtttacagaatgacaagagaggtcttacctcaacaaggtggaaggagataaccaattccgtaaagttgcctcctaacctccacagagatgttgtgggatacacatgtatgtacatatacatgacatgtacacagaatacaataacaataaatttaaaaaatgaggtggagaatgagtgaggaagatacacaacattgactttggcttctacattcatgtgcacacatacacacagcagagtgccagccacagaataaaatgggcagaagagcaagcaaccaacgtgatgtagttttcatgcattccactgccatcagtatcgtggtcagttgggtgcttagtagctctggctctgtgtctttatttcaatgacctagatttatgtgtttctctgttgcagatatgtgattgtggtgcgcatgcgtgtatttgaagaaggagaatgtccatcccactgaccagctctgccatggacaatggtccctctacttgagaacacaaccccagatatctcctgggatcatggcaaatgccaaggacttattaatttactgagcattctatgaccagtgcacagtaccaggacatcacatggtcagaagcaagtcttgacctcagaccactcaagatccagtaacagagactggaacataccagannnnnnnnnnnnnnnnnnnntaccagtttgtaggcatgctgcacacaatatatacgcctgatggttgctttggttttatagaagtttgaatgtccctggagataggtgagaagacagatgtatacacatctggccatgagcactcatcacagcagggtagaaagggaaggaaggtggggaaccacatgtttttgtattgcttatgtcatacttggaatgcatatcacttttgtaatttcaccatttacaaataagtatgtaaaaattaggaaattatcagaacaccttttctcccctgctaccttctagccacaatgctgctcaaagcagagacttgtcagatcttatattctgtcagatgagatgtgtcctgcctcctctcagggattgcacagcatatggtaatagtgtcattagcactgtcccatcttgaagcaccctctctttcaggatgtggggttggttcatttattcatttagttctttccttcatcattattaaataaataaaaacgtgtgtgcccattgcccactgtccgctagttctgggctatccccggacactggctcttcccttttcttaccttcccacacatcctgttttgttttgtttttccagctcttgaggtaaatagtcttgaggtatacacactagtgaatatcttgaggtagttggaagggctgaccagcaggagctctggctttttcaactcagtggtaaagggctctttagagacttattctttgccctaccccaatgctgtgtaatagaggcattttctcggctccatgcccagggtaacagagctgccaggcaggtgtgtgagtgttggttaattaggtgattatatgtgtcccacagcctgggctgtctgctgctgagtctgggctgctgggaagccctccctccacctgggaatgaatttcttctgtaaggctctaatgcaggaaaatgtaggaggaccactgcatgcccagcctctgtcttgcctctaaatggttctgcttctttcttctatcaccacttatgatgtggatccggattctggtatgttccagtctctgttactggatcttgagtggtctgaggtcaagacttgcttctgaccatgtgatgtcctggtactgtgcactggtcatagaatgctcagtaaattaataagtccttggcatttgccatgatcccaggagatatctggggttgtgttctcaagtagagggaccattgtccatggcagagctggtcagtgggatggacattctccttcttcaaataaacgatactttcaacccccacagctttggggccactaaggaaataaagtaatgggtcctcgtctcttgggaccagactggaaaatacccattttataatctctcataacaagacaatagagcgctgaggaccagtcatcttgaccacctattctgaactctaggccctgtggcagacatctgaacttcatgtagttttccttaggttcttcaaggctttgccacctagggatgtcagaccgacttcaggtttcagtggctctcatattcccccagacccatgaacttcagaatgccaatataaataacaacgactctttgggggtacagatgtaagggttcattcccgtgtagccttgaagacagaataagctgatggcatattaaatgtctttgtaccctgcagtccatagtaatatcacagaggaatagcagaccggagagctaacatgtttctttacacctatatcagaatttgtgtatttcctcatgtctggaatgcttatatttctagagctgccagtttaaaaaatagtgtgctccaagaatactgcctggtactagagaagctaacctctgttccaaataccatcattggctttctgtgtaaatttgttggtggagagagaagtttaaaggaagacacctcacagtgaggctggggaattaggtgggcaacgcctttatttacagatgtgagctttgtctaatatttaattgtaaactgattattaacaatagcccacatatagcctacttcctgttatggtttgtgtgacccacttttcaactgtgtgctgccaggaatttcatttataaacttccttattgtcaagccactgtgttccagtgtgtgtcaatactgtggaaataaaatttataccccctggacccatgcagattgatttcgttctggaatgaatagaaatataacctgcgcacgtcaaatgcatttctagagcatctgctatccatggggaagcttgggagaaacataaagacattcaaagcacacttcctttcctctaagaatctacagtccagccagcaattttacaaggcttctgggagtggcatgcacgcacactatcatagtctcttgagttttgggctattattattaccgttttcaattaccctgtattgaacaccttctaagatgcgggtaactaccttagattgggctccctggaactcagcgtggtactggagaatacatgcaggctcttcaagggtgtgctcttaggagatgctctcaaggatgtgaggggagccaatgttgaatggaagagaagtggtatggaccgctggcacagggtgtactttcaggggcatgtcccctagaggccagcacaatttcagtgagcgccgctgcaatgtgtctgtgtgctttgaaggaagtcatcaccaccaggattcacatgcatcttaatcactacagtgcagatttttgagggttttctgcttacccttccttaagccagaaagcccttcagagtcattatgccttagatatacacgttgtagatgaggcaattagacaggtagaaaagtgaagtcatttacctaagactgcccaaccattacagggcagcctggcacgcgtgggagctggggactatcagattttattagtcacttaatcttcatatggctgtttcacgacagccatgatcatttgtagtagatgaattgagaagatgaagtattgacagaattggtgatttggccggtgtctcagaactaaggacaggagaggccaggatttccctcttcaactacactgtcttacaggaataatatgtccagtgagggagacgctactgtgactggagaagacatcatagccctcgtgtattttatggcctactgatttgcccttcattgttctgcacagaatcatgtccttcaccataagtaaatgagcaggtcacaaagttagacaatttgtatgatttttctgatctcagtttctccatctatgaaatggggataatgatgacttcccaacaggaatcaaaagaaactgtgtgagaactcttccaacatgacacatttccctgtcccaagctcaaagctttaggactaaccaaagacagtcttcagtggacagacactctgaacatagccatggtatactgatcctgtctcttctcctttgcctccttttcttggaaggaaagacagagagacaaagtcctctatgcaatttgtgctgacactagtctgttagtctaatcataacacagttcttagaaacaaacctagcaacagcacttatatcttacttttaaggtttaattggctgtaaactcgatttacgaggttcctttccccatcaagtgtgtggagtattgctgagttctggttatctcaatgtccccttcttcagccagtcttcttgttatttaagaagccaatcagatgtttgttctctgggcatgtgccctgggagccctaaccattctcagcgaaggtggaggcaatctagtgagccttctgttccgcattatccacaggggtgctctcccactggaatctctgacattgaattcttccctaagttctttttagtttcttccccgtgtgggtgtcctcacccatcttcagggtagctcttccctggtctctggtgcccatctcctgccttgtaccatctgtgataaacctgcagctcagatgagctccctttattctgaaaccagccactcctcactgcaggttccaatgccagtctatgaagcctgtgttccagtatggcctggtgtgctgaaaacacacattggtgctaccctgcttttccaataaagtgtgcctccctctggtgagcttcatgttgctctcatgttaggatcagcctctctagggaggcagccagggcccagcacccacctggaaagagcatcccctaagttctccctcacagattttttttttcaactgaaatttcaatcctcagttgtgtagggttcgggtccctgtgagggtgcctgatgcatggtcatccaggaggaggtggtagaaggggttgtgcctgttgctatggcaacacccagctgagatcatgaacctatttcatttgcagagagttgcaagatgaatcaatctcctcacccactccttctctctagcttcttcgtgtctctccacagccttctgtcatccaccctccccactcaaccttagaagttcttgctcagtgtgctctctctctccctcttcctctccccctccccctccctctccccccctctcatgaatccacatagcagttgatgttactatggtactatagcagattgttgatgttgcttctgaacccacacctttaaactttaatcagacatccctggaatgtctttttctttagacaggtatgctcagcctgttgactgcaagccacatatgtctcaggaaagctatgaatatggccctatgtacttgtagatggaaatgttgtttcacggtgcctaaagcttagatacccctagctgctccaacagaatatctgagaccatgtgatttataaagaatagatttgtcttttggctcatagttatggaggtcaaaagtgcactggcatttgaagagggccatgcttttgccaccatctgtctctgtgatcactacatcttctggaagggcagagtgctgtgttctcatgtagcagaagaagggagggcaaacatggcaaagatttcctccatcaagccttttaattacagctacattccatttaggagggcagagatctcatgagctgagccccttatcaaaggccctacctccaacacagtcatattggactttagtttctaagtccacagcaggtatattaaagtgtgcattgctaaggtttagcagagttcttatctagagacggtgttgggatctaaggctatgcatttccaacaaggtcccagctggtgctgatgctgatgctccaggcccaggggccaccttctgggaagctctgctctaggctgactttctccaattggaattgggagtgactagaataggcctttcttctttgattctaatgactggacgtattctttctacatcacatatttgttaaatccctttaaagtggcagacactgttaggtgcgtgatatctagagaaatgcaaaagcttcttttccaagaattcatggctatgtatagaaggaagacagtatatgctacgatgaacaatttagtattcaaagagtgataaaatagaagaggttgaataggcaattgtttctttgctcatggaagtaaagtatttaggtgagagtataattaatggtgattcattcccccagcctcaagactatctggagagaattggactttatctatataggttaatattaaaatctgatgtttgtagaatatttattctatttcagatactgtagcaagcactgaatatgttgacttttctgccctgtcacttcttataatctcaggcgagtaattcaacccttcaactcgctctccagagagaaatgggagtgctagtatctgcctcaaagaatcattgagaagattgagatttcgtgtcgatgtggatgcaacatctatagaaatcacttaataaaatgttgactcttatttccaataaactctgacctattgccctagaaaacaagctacagaattgtcctagagaacctcctgccatccaggctaaatcaccagcatttggccaagagaattagggacaggcttggttttaaatgtggggcttagaggaccccaaaatatacctggaaagctcctgtgacaccagccagaggaagcaagccttcctgtacattaaggacattggggtcactgagatgagacatgaggaaggctttgcaggatggttgagattttgaaggtgaattgtgtggatgttggagattggattgtaaagttaacaattaaaaacattccccagcaaggactacccctaatcatccttcagtcggggatgttaaagcagcaggcatagcactacttagccctagagagctagggttgatcctgaaggagattttctgccctattgcaccagggccctgtaccataggtgctgtagtactggacacaactttcttagtaggcagtgaagcactgctttctgatgtccctacaaaggacttcctcttcctttcttggtctctaaggattgctgtgtatttttctgaatgagggagacttccctgggtctttgggggtcctccaagaaagtagaccatgcccattcccagctgagctgtcttttctatctccctacccagctttgcatacagctgtgattgtcactgtgtgagagggcagagtctagcagtcttgttttaatcctttccccagctcatcagagataagagtgatagaggctctctcctctggggaggattataagttattctttgtggtaagatagacccaggaagagcttattaaatgataatccctgataaattccctttaatcacctatgccctcttagtcatggaaaaacccctacacattcaattaactctttgaaagacctttctcatccccttccttctctcccaccccttcccttcccttcccttccccaattcctgcttcctttccttccttctgatggcttcaggtttatttgtttagggtatgttcatatacttgtgtgttcatgtgaatgtgaatgctgcccttgtgggtgcttgtgttcttgcacctgtttgtacatagaggccagagatcagcctcaagtgtaattgctcaggtactaatcactctgagacaagtaagacagggtcttttactggccccaggaactttctggttagactaggttagctgtccagaatgccccagtgatccatctgactctacttccctagcactagaattacaggggcaaggctcagcaaaagtattgctaactgagctatcctaccatgtcttataagatttaaccagggccacccattaagcttactaatatttattctttcaacaaacatgtactgcgttcttactgagagctaagttggaatgggaacttggatccacctgctccttgcagttgagtgtcgagccttgtggtagagaatactacattcagcaggtacaggggagaggtcggtgaggtattgggataaagtacagaaaacccaagtgtggtagcctctgggaagtcttcctagtaaatgtcaggttcaatcatgctttgagtccaaacttttcaggtagaaaagcagaggcaggcaccccagagtatagcggcaacatgaacaaagaacgtggagctaggaaagaactcggcattcaagaagctatggtcttgtatttggcaggtgctggggagaaaacttatacagggtcggctgggctcagacacactagaggctttggccaggacagtgctacagcatattaaggggagatatataggttagaaatgacaactgccccccagctctgaagactaacaggatctccctggcagtagaatggcagttgtgcaactaaccacagaactggctgtgtcagctttccagattcaccaggtgtctgaggcagagaagaaactgtgaggtcagggtgcagagttggaagaacatcccatctgggtagaactctgagagtcaggaaccatcgtcctgctgacattgctactgtgaacgcctgcacctgtagctctgttctcagacatactccaagggaaacatgattagttctttctcttccccacccacaggcccaggtaacacagcgtactgagagaagaaagagaaaatctaggtgtgggttctgcctctttagtatattaaccaggagacatttagacttgcatacccttattgtgttctttttaaatttttttgtttttttattatatattttttaaagtttgagattataaggtatacattatttccacttccctttccttctcccaactcctcccatgtaccccactcctttattttctttaaaatcatagactcctttttatttgattttacacacactcatacacccatgcctgtacacaggtatgtatatgtgtgtttgtgtatgtgtgtgcttgttttatatgtgtttgtatgtgtgtgtgtttgtgtgtgtatgtgtgtatttgtatgtgtgtgtgtgcatgtgtgtgtgtgtattactaaatacattgaatacaacctgttccatccatataatgttatttctttgtataaaatttcagggctgaccattttttatcctcccttggaaagacttctttttccagctccaggatctagttgtctgcagttctttgtccagggttgaaacctctcgaattttcccactttcacattaacctactttttgatgtccttgttcaggtgagattttggcagtcttattggtaagacttgatgagtgtatcctctctaaaatttctgggagacacaatctcatagcaaggtttctgctcctctggctcttacgatctttctgcctccctcctctgaaataatcacggagccttaggtaatacgttatgctgtagatggatcaattgggtcttgggtccacatctctactttttgatcagttgtggttttctgtaatggtctctgtctattgcaaagaaacgtttccttgatgaggagtaagaactgtacttttcagcagctataaggataagcattattatgtagctagggattatactggtttagtaaaatggcacttgtaggttctccaccaagatccatgacctcagtgtccctaggcagttatctatatttctagtatcaggcttaccttggttgtgtttagcatatagggtgtagattagaatcagtatatctatatccttggtagagtatccagcccaaagtagatgcttaacaagaggaagtaaaaactacttttatctctttaatatctctttgataccttgaggtcaaagacacaggacaatattttaagatgtttcaatggttttcttagtgtctcagatagagtatctgcctttggacaacttaggtgtgttcttgtgatactcattgtctttaaccctatcacatcacacctggatgaactcaaaagtttcctacaagtagaagacacacaaagcaattctttccaccattctcggattgaggaagtaatgaccattatttattatctgtattctgtttcagatgtatacctcaagtgattaaaaatgttgggttgaattgagctttgtatacatgtgtgagtcaagggaagaatcaacatgaacttctatgagggcagcttcagagtgagccagagagtatagctcaatggatgagaaagatgctggaagtagatgattagaacctgggattgagggcaaagtgaagcatattgagatggaatgggaatagatgtctcacatagacacctactgaaaggacagattcccctttagatagtctcgggcacaggagttagtgatggttataggatactggtgatgtacaccaggcttctcacaagtaaaggggactagcatttagcctctgacttcccctaaattccacagtagccacaagaggggaagaagtggtaccttgtgcttccttgtagcccagtgctacaagtatggggaactaatctgtcatcagaccttagagagtttcacctagctcttctcatgtctcaggtgataagcagacatgtaggtttcttgcattcattaatcatagcaccagtacaagtgaaatttaacatgctttccagagatgctgacttaagtcctggagaaacaaaaactcatgaaccttgggcccttgctttcaagctgttttttccccttttaatttagctattaattttacatcctgattgcagcctccctctcctcccagaaccccccacccacccatatagcctcttctcccccaccccctccacctctcctcttagaagggggaaccccatctctggacgccaccctggcacatcaattctacagtggcagaactagggacatactctcccactgaggccaagcaaagcagcccagttcttattgaaaagcaggaggttttcccgggaccacaaaacccaaaagcaattgctctggagtttcttcaggaagccagcaaggctaaccagcatcacctagggtttggtgcacagttgttaattaacccagatatcttccatgataaattaatttaccttctgttcagaatctggtgagaaggaaaaatgaaagccaaggcaaatgattatcctgacgctttttccttgggtgtctgcgctaatatactgtgaacatttgagctagctgagtgtacctgctgtatgtcaacagagatgccattttgcaagtgatctatttatttccagagaagaaaactcatataggcctgtgaagcagaataatgctaggagatttataatcttttattagtcaatactattattaagaatctcttgtttgtagagtaaatatccttggtattggtagaagtacatgcagaaatatgagataaggttctttctccaaaaagcatttagccctagtgggaagggagggacaatatgtaaaagagacagaacagaacccattttaaaaagatctatgagtaagactaaatgctgaagcatagcacttaatgctgaattttcagttgcaggtggttttttttttcccttactgacttagcttttttatagataccaaagcccttgactacaattttcctttcccgttgatttgatgcccatattcaacatactcagacatgttgaatgaatatacatgctactatgaggtatacctaattgctgagggaaatcctggagtggtgtacttaggaaaagccttatagatccgaggagagtctctaagtatgaaaggacccaagatctggtagaaccaggaataggggaaggagcaaaaccagaaggactcttggacaatggcagatctgtagttcaggctgccgatgagagtcccctatagcctgattcttcttgtcttatactgccttccttgctactgctgatgcaactatttgtagacttatcattatcatctatctcccttccttggaatgttttttaattagccattagagagtttctttttccaaattcagatgaaagaaaggtcgcctaaaactttgcttgatatctttaccctttctctatttaaattgcagtattcatagtctgatgtcagtagccttgaccttaagcagaggtgtcttcctcatgtccttaaactttatggagtctccagatataatcttgtgataatactaattccataggaaatactaatgggacatgtggtcatatgcaagattaagtaccaaaaagaatatgtagaataggggggctttgcagagtggtttggaagttagaagcctggtattctagttttacttgtgtatatgttagacttagctgtattcttcaggacagttcctgacaatgcaggccaagagggacaagttagctgtatcaagctcaggtacctttgactgaccatactccacagagagcattagttacttacagcagctcctggctcaggcaggtgctgccctgggacttgcttgtgtgtacttggcatgtttatgaagtctgctacaggtcctgagacataatgaaatgacttgcctcctggaactcaggaagaactttctgtcttctctccttccatctgctttcccattctcctccttgctgggggctgggagggtagctggggcttgcaggatcctgcttgtgtttgttttccctaagaacagtggttctcaaccttcctagtgctgtaaccctataatacagtttttcctgttatagtggcccccaaccataaaattattttgttgctacttcataactgtaatttgctactgttacaaattgtaacgtaaatatctgatatgcaggatgtctgatatgtgacccataaagggatcacagcccataggtcgagaaccactgccttaaagatggtgacaatgtggatgggattgatttcaggcattctgatgctaccggataacaagagtcagagtctcatgaaactgagtcactacagctctagagtgtggatacagatccttcagtaatttgtatcctcaaaggagtcattatgcctctctgggtttcagtttcttctagaaaatgatagattgggccatgtaaactcataattttcttcctggtatgcagggaaccagcttcaataatacatgggtgggattcagaatatccaacagcttataagctatactgttcattgtgtcattttcctaaaacacggggtggcaaaagcatccagtggctctgttgatagaaatgtcaccaaacagctatgattcaggtgctgtcagcctgttaaggttagtcaaagccctggcacggacggtataaaacatctcaagtcagattccttagaaatcgactctgggatggaggtgcttgcttactggatggattatagaggaatcagtgctaggagattcctgaaagaatgggagaaaagtaggtaggttggggaacttgaggcagagatgtggtctcagaagtgtttgtatcagccttgttcaataggcagttccaagtgtgaatgcataacacgagcgtttcatccagcctgacagaggatggaccatcaacgcttcttcagctcaggcagctcttggccacaagtcctcccattatcaccacaagggtatgaagttcatgttgaggctggtcttttatccaggaacaggcttctaaggaggggccaagaatgaggctatcatgagagctattcagagatagcacccacagcagctggggatgaatattcttgtaggttatcggtagaaagtctggccaggggcagcacaaactctgtcacacccaaaccactgactcctatgggtggtttaacatatggaagggagcattcacatggcactaaccaatgatgagtcctgcctagtggatacttagagacgtcaagacttggttacagttaagaaaggaaaatggtagccagaagaggcccaagggctactgaatactgatgtagtaatgtacattatgaaaagactcatctaagaggtatcctgtgagttttattcttttttatgtttcagaatatctacatgggatcgggcaggaggaggtactgcatgatagtatcattcattcaaagaaagcaccccttttccttcttgtagaccacacctcactttcattcatgggattctttctcttaagacacatcatttcctttctgttgaccagagtgaatccatcacttgcctgagcaccccactgtcccttaccaacactggcctcatttgcaattatacttttctgtgtgttttacctgttcacatgaatattcctattatactacaagttccatggtgagcaagactgtgactgttcttctgttcgattatctttagaggaaagaatttgctccttggtaggtaattcatgaatgtgtaggatgaaatcacttgagttccaaaacagaccacctaagtcccttgaggtaggatggaggccccaaggcatagtgttaggaggaaggagggacaaggaggaatagttacttggtgaggaattgtctgcctggttcgggaccttaacagaaggtatttgttgagaaattgcatctgtattcacatttcacaatcatgttccttttcttaggagtggttagcattggctgagacaaatggtctgtctcttttggcagtctggtagctgctccaccaccttccaacctgagctattagtaattagtgaaattgaagatctctaattaagatgcagtcctgaggccagaggtttttagtctgaagctgtttttatctttccatgcaaaccatttggaaattctggagacattttcatttgtcacaactcagggattcccactggtatctgttaagtggaggccagggctatgctaatacctgacagagatatgcaaaaccctgacagagaatccccctgacctcaaatggaagctgtgcttcggctaaggaagcctgcaatctggtttgggtcttctagctaggactgcctcaaacctgggaataagggggttccccaaagactgtttctaaagaattcaggaacctgctctttctttcccaatactttcagccataagcatggcatgggggagttcagcctttttgctcagagctgctctgagaagcaagagcatgacttgcaggtgcttcagcatccttttcacagagctgggtaggaccctgtaagagttctgaatgtatgtcctccgagaggaagaactataaggcccctttctccttgctctttccattcctatctttctctcccatttggctcatcctgccctatcttcctgcatctctcccaccccacccccgaagattaatgtgataattgccatgtgtgcctgtttacacagggagtgggtgagcttaccaccctcaatcaggcaggttcccaaagaaacgcagtcccacgatgtcaggactggtacccgctgagcactcctgtgcaggtgggctgccacccccaaacttctttctctgtctgtcatcatcgttgtcatgtgcacatgtgcatgtgtgtgccattcagtgaagcgacaggtgagaaggaggagaaacagctagactagcatcaggagaagggccaggcagaggaattgctatgcattataggcacatcagcccttaaaattagaggacaatgagccaaggaaaagctctctctaatgcctgtcacgtggtaggcctgctagggtactccagggaaaagcaacgggccaaggaggaaagggttcagtaggagaatcagaggctgggatgttcacatgaggctgtttgcaaactggtgaagccagtagaagccagcagaaccagtatgcctctacctaaattgggagctttggaacaatggaaggtaatggtacagctcttagacccaggccaaataaaagccacaagtctttgggaggttacttgttcaaatcccaatgtcaagttcagctggagttctaatgtctaaggtcaggagaatagcatctggttctaaagggcaaacaatcaatgtgaggtttgagattgtcatatgaggacatgaggccagtgattccgccttttcatttccgctacgcccatctcagatctagcaagtgggaggcacctataatccaattgaggtgtcttccatacctgggactctgatccacaagcaaactttctccgggtatgatatatcacacagaccaagctttgccagccactcagacatccttcagtcccaagttcgtcattgtggcaagtgttccataggtgtgaaatgatgaggctgttctctacgtgacattcattgcagagaaaggcctagtccacagttgtttcccattggaggtctgggtgggaaagattctcctatgagactatactggggcaggaactagcagatgatattttggaagctgcagtctcatgcgtcaggattttatcggaagaccttagcatggctatctcatgttcctaaaggtaaaaataaggtttgagtatcctagacgcaaaagtgccccgtgagcattgcaacagtcatgggcacagtgacgagcaaaagggggagctccttttctccagaccgtgacctcctatcccctctagagacagtcacctggacagcccaagagaatgacccggctctggccacactgccaatggtaccctgactcacagcatcaggatgcttcatgccttcagagttgttgattgcttcatttttttttaaagtctcaaaatatacacactaaaatatagacatctctcctacactggacaattttaagtttttaataatgatgaatcagaaggagatgaaagctccatttagcatctgaaagaaccttgccattttgaaggagggaatcgtgagcaaagtcctctgcttgcccactttctgatgaggagtgtccccttcatcccgttggcttttggaccacaataaacatgtgaaggggtgggaagccacctggtcagaaaaggtggaagaaggaggacaagaaggaaactgcttgttaggagttgagtgtggagggaattcagcagtgatgttgaaaggccctgagtgatggcggacaggcgctatcaagcttctctcttctgcaggaccttttgagctgccagtcatttccttaacccccagaacatcaagctgctggggctgatgtcttcacagctatcatttcccccttctcttcctcttcttcctttttcttcttccaggatgccccattgctgaaatagatgacgtgtgtaattcagagaaaatttcacagatggataaaatgttaccagaatggatttgtattgatctatttttaacaagcgtgtcgtcatcttcaaagtgtggccatttattaattaattacctctgtgtatgccaaaatcttcgtcatatcccagatattaaaatactcagatagttaagagtaaacccaaagcattctcagccaactctggctggaccagtactgtttgtcatgtgagttttgtagaggtattaggaaggacatttcaaagtcttagtcagtaagggagagattctcttatccttttgtctcatggaatatatcctctgatgtattcatagagttgtttttgtttgtttgttttttttgttttttttgaaagagaagggttcaccaccaaggaagttaatgaaatggtatagtgaatgaagtaagcaatatggctttccaccattcttctcactagctgcgagacatagataatctgccatttccctaactttctctggttaccaaacccattttccacaaaatgccatccttgccttctacaaatcacagcaatgcagagtacgcagttttatatagttatataggtttcactctgtagccgccctagctccctttcaaccacagctcagtgggagatcagagatacctcaaaatccacaatttcaacattgccactgctgatattgacacttttatgggcagctgagctctgatccaggtgcttggtgtaaactttgtccctgctgccaaagaacactgaaggagggactattgaaatcttaaagcaagtggattatattcatctggagccactgaagttaacaagactttaaagatatattagagtccccataatcatgaagacaggcagagctctgtggtgagcatcaatgtctaccttagctcacagcaagatgcacacctcagtcatctcagtcacacccacctgccccgttcttcacaccccacttggctctcagcatatggttctgctgcatcttctttctgatgatgagacatggctttctctgggatttgccctgtgtcctctctacttgtatctaaccaagactccggtaagccaaagtctctgacactgaagtaaggcagaactttgttccatacagtttaattttttttcatgtagtttgtttgtgtcaaattttgagtcaactttattccagtgatctgatctgtgatcagtgcagggccagaacaaaaggcacaaagttgccaaaaggacttgggattatttttaatggaagatttgactgtccagtgacagcggccatagacaatccacagataagttatgtggcttgacattggaatggggaaaaaaatgagacaaactggagagggaaaaattgattgggtttataaaagtccacaagaatcatgagaatgaccactttaagatatatttccagggtttcgtagtaaggattaagaggcacatagaaggcatggatggtgggccagcactgcgccacagatgttctgagctctggatctggcatttgatcttgagggacccatttccccaataaattagggacaaaatatccattgtgagtttcaaatggatattgaaagtgattcatgaagggtggggatagggagagtgttcaaaggtctgcatgtgggaagtacaaatccagaaaatcccttcagaaaaacttgagcaggaagaatccaatgaacaagacccattgttgagagacagcacctcagtattcttggagctcaaatttcaagggtctcataagacatggcaagtcaccctttctcagttctgggcgcctcagcaactctgcatccaacttggatacaagaatccataatctatatttctgtgctttccccccacttctttgtatcagcaagaggtagaggagaagggagcatgatgagagagcttgagggagatcagatctcataccatcactctgaaaaatctagacatagtctttgttctgcccagggctttgctggggccagacctgggccagctctgtattaccagcttgtgatgggtaaaggacagctaaccccagaactgggtaacataaggaagagcctaagtcgtcctaaggatcccttctaagggcttttctaacacccatggggtagggtgacaagttcagcctgcccttggttttttgttttttggttttttttctctttttctatttatctagcttaagagtgcaaaggatgagaataaatgttaccaagaactataaagccaactcacctttttatatccttggaaaaaaattttttttgatttttccattcagttttcactctttctaagtaagggtattagaattctctcactcaggatattgcagagatactgatgtggccttcactaggcacagggtaaaatgtgagttgtcttacaataaagtggagtggggttgggggtgaggtaatgttgaactgtatcacgccatgactgttacatcacccacggtatggaacctctggaatgcaagcctcgctcctggggtggctttaaatcttacgaaaccatttttctttctttcagaccaatgatgccttaggagccacctggaactggctgtacttcatccctctcatcatcatcggatccttctttgttctcaacctcgtcctgggagtgctttccgggtaagccatacttttttaaatctccttttctgagctgctatctgggggctaaaacctcctgattgaagataggttcactcacttacctgtcacgtcaaagacactgggcagacccttgtgccagtgttatcccagctatgtcagtgcggtaacagatgattgttttaatcaccttgattatttttagactttaaaacaatctatatgttgtgtacagttgtaaacacagtaccttgtgagttctttgacccattcatatttccattcaataactctgtgtcaagcactgtgctggttgctgtagacatatagttaaggaagacagagactctgtcctcaaaaaaaaaaattggttgctttgcagtatattggacatcacattacatgtttgtaannnnnnnnnnnnnnnnnnnnnnnnnnnnnnnnnnnnnnnnnnnnnnnnnnnnnnnnnnnnnnnnnnnnnnnnnnnnnnnnnnnnnnnnnnnnnnnnnnnnnnnnnnnnnnnnnnnnnnnnnnnnnnnnnnnnnnnnnnnnnnnnnnnnnnnnnnnnnnnnnnnnnnnnnnnnnnnnnnnnnnnnnnnnnnnnnnnnnnnnnnnnnnnnnnnnnnnnnnnnnnnnnnnnnnnnnnnnnnnnnnnnnnnnnnnnnnnnnnnnnnnnnnnnnnnnnnnnnnnnnnnnnnnnnnnnnnnnnnnnnnnnnnnnnnnnnnnnnnnnnnnnnnnnnnnnnnnnnnnnnnnnnnnnnnnnnnnnnnnnnnnnnnnnnnnnnnnnnnnnnnnnnnnnnnnnnnnnnnnnnnnnnnnnnnnnnnnnnnnnnnnnnnnnnnnnnnnagaccgtgaacaaaccatttttattcaacaaatggttaacgccacagtagttgtaaaagctgaagtttaatggcctccaagggaaaatgataataaacaggcagactgacacttcttctgagctcaagaaaggattgggaactagagacagcaaatattcctgagagctggagtgtacatgctattgaaaacaagagagtgataagaaatcatactacctgctcagtctctagataatactggctagtatctgccccctgaacacattaggaggtcgaggtctgagccatcaaaggttagactggtgacactcactgcatcttaaggtggtcttgacaatgtcatggaaataagaggcctaagtgacagttcctaaggtgagtgtcagctccacgacccacttctgtttctcagaaaagcagcaatctggcaatagtttagaggactctactgaggggattctgtcttaaaaggaaaagatctgtctttttgacagtctgatgaggtcagagaaacaggttccattccgtcagccccccagcaaagctcaccacgctcattccctatggctatcgcaataaacatcacaatccaggtagcataaaatggacggacatttaatcctctggtagtttttgagttacaagttccagatctggcaggcccgtgctccctccaagggctggagagaatcatttcttccatctcctacccggctttggtagatccaggcatttcttggactatcaccatgactacacgtcaccccagtctctgcttcagggctcacatggcctcttcctctccccggtctgtcattgccctccgtcttgctcttataaggatacttgtgatttgatttagaatcactgggtaatctagtttgatctcatcttttgaatacacttaactttgctggtatctgccgactcttttttccaaataaggtaacactcaggagttccaggaattagaatatgaatggtcttttgaagccagttgccattcacccactgcactgatacaccactggccccagcagaggatgcagagtttccactgccttgctcataagtgtgagcacacagccagggatcagcagcattggagggaaatgcccagtgtgaaggtcccttagcagcataataaggagacaagagacatgcatgactgtgagcagctcaggtagtaaaagataacgtacaagctcatgtctgataccagcagagatagagacagaagttcatacataaaataatagcttatgatgagagggtgttgagatgaggaagggctgtgggaactatatggaacatacacttgatgtgaaagcagtacaaagttgagttaatgtcaacatgtaatcaaaccaaaaagataataaagttggagtgagaaattaagggtaccacttagaaagtatggttaggggagagacaagagacagagacagagggaagcacagacagagagacagagacagagagagagagagacactgatagactcgaagagcaaggaatggtgacaggcactcataaccccagcccttgagaagcagaatcaggaaaaatcacatcctgggctacatagtgagaccttgtttcaaaacatttacaattgagccaacgctttagtaagaaagtttaataaagagaacaatgaagcaggaagaaagaattaacgtagaaaaatatgagagaagttcccagaacaaaagactcagcattgccagatttaaataaaaccgtggactcgtgtgcaaagatgttatttctggtgtatttcttggcagtgggcatgggaagcacggggacatcccaagctgggaatttagataggtaaactgttggatgcacccctggcatgtgctgtagcaataagagtaacagataccgtgtacacatggacgggagggtatcttaagaatgtttcagtgaaaacaaggagacaatgtgatatgttatcacatttgtatatgtataaagcacagttggtaaaatgtgtttaaatgtaaagttatgcatttggcaatattgtaacagttcatgtggcggaatgcagatgtgtaaactaaccattaaaatacccaagcgttaaaaagtacactccatataggaaaaccacaccaaggtaaattgctgcgaacttcaggccatcagagaaaagaatgttctgaaagtttctagccattgggtatatggctactaattggtataaggaaacagaatgccagggagtttctcagtggcaacactgaaaagcagagagctcctaaaacttcccaacagcaaaacggctttcacgatcaaatgctctgcctacccagagtgccagttatctgtatggacagaatatggacattgtcaggtacttttgggggaaaagcttgataaagaacacacgtcactaagaataaggaagcaagtaagaaagcaaggaatggagctggggagatggctcagaggtcgagagaggaccatgtggcagttcataaatatctgtaaactccactcccaagagatctgacatctgcaggctgtgtgcgcacacacacacacacaaacacacacacatacacacagagaaagagagagagacagaaagagagagaacaaacatatatgtagacaaaccgtaatacacataaaataataaagtaactttcaaaaggaaaagacataaagaaaaccatggtacgcatgtacacaagtgagtcagtagaggacaaagacaaagggattgagccctggtgttacagtgtaatggaattagggtaataactctcagtgacctagaggacatcatcatccaactaacatagggcgacagaggtcctcacatgctatctttagaaaacaagtgaaactaataaatgccccgttgtgttatattctgaagggctctgtgatttcttttggtccaactccccccccccccacacacaaaataatgtattctctctctctctctctctctctctctctctctctctctctctctctgtcagcatctctgtgtcgcctctccccatcccattaccccaacttaagcacttaattccacatcatgcacaagtgttactcctaacgaaatagaaacacagcaagtcttctgtgtagctcagctgacaacctggttttcactgttgatgctgaagcctgagctagtctcttgcaatgttgcaattgcctttataggactggagaatacctaataaaaaatatattaaaaaaaaaagactggagcaggggaggctaaccatggggacaggaagagggtatcaaaggccaaaatcttaggttccacagtcagcaaatcatcaagcagttcctaaaattgaaagataaagaaatagcagtgtcttaagtataatatttagaaaatgtgaaacgaataccagaagaaacagaagagttgaaagtggctgtctctggagagggagattctgggctggggaaaggtgagacagagggctgctagtttttttcattatgatccttcaaaacctgtttgacttttaaagttctatatgtacatctttgagaaaaataaaaaccttaaattttgaagtaaaatgatcagaaaacaagtaggatggacagacagagtaaggacacctatctaataccagcatggttggattgacatggagggaacagacacaggataatcaacaaggaaataattgcgccagtgttaccagtgtcacactaagaaacatggcagaactctgtaaaatggtcaaggagaagaaatggtggccactaggaaggggtttgtaactgtctgtgactatttggttgttcccagttctgtgggcatcaattcctctctggctgggagaccgtcttcagtcagaagatgccatgctactggtctggctgatgcctctttactacctgaaacctaagaagtggtgttggcagctggcaacagctggtgtgaaagaataaattctgacatttaaaggagtgttaacaagaggaaccttgcgagctggggctgaactacttttgccttggttttatttctgtattctggtgcttcgtacattgttcagcatttagaggattttcactggtgtctacagagggctcagtaccactgggtcctgtggataggaggggtcatgggctttctcggctacctgatctgtgagccctggcctctagaaaggatgaaacctctccgttggagtggagctttgtttggcattcacaagttgagcctcctgggatgtagctttgaacattttgtctccagggaacagggttctgtgacctgtgagtgtgctggatgttatgtgcccatgtgattccaggagtggagaatcaacaatttctgtatatataaggaagatacacattgctccctacattgagtaagagtcccccgggcatcaagtatggcagtgactgaaagccccatcccagaggttgagacactgatgaaaaactgtgaggcatgtttgttggcttcatatttaagaaggaaagatggatagaagcattgtagcatttttacgtgtctcagaggaaataggatttgatgaaaaccattagcttaggcttgaagagaagcagagcttcctgtctccatggcaacaaactagggctgcataagcacatcctgaagtgctgtcaggggctacagggcacaaagctcacacaaacagaaaatgaccctgagctattccagcttctccacctattgcttccagggcttgtgagagaggaagacaagtgtaggggccaattgtgctatctccaaataggggcaaggaagttaggccaaggactacttacagatgcactggggagcaatgagaaggctcacatatgtaaaatgtcttgtagttttcagagcaccttgcttccaagatcttattcatttcttgccacagcttgtgttggcacacaacatctttaaagacgaaggaaagagctaaagaaccgatctccgacaagttcttggcagaaacaggccagaggtcattgtcgctcaatctctggttaggtgcttatcttattatcccaggtagccttcagaaaggcttcctagagtgatgtcctggccacagtacaaagggtaggttcaaagtttaatgtgtacatgcattagtcacatgcttattcttaacacactggtgtctatatatgcaatgttaccttgtacatatgaagaagaagaagaagaagaagaagaagaagaagaagaagaagaagaagaagaagaagaagaagaagaagaagattattccaagacccactagcaagacctttttgctctaaggactgatggaaagaggtgaactgttaataagagaggaagggttcttctggttgcatttcttcaatgaccagagtagcttccatagcaagcaaaaagacaggtgcctatcttgctaccggctcatttactggctggatttgacaactggataccattcatcaaacctttgtttagtatttgctgcacaaaagacactttgttctcgggttgcaaatctgaataagacaaggtgattttagattaatgaaggaaataatttaagacatctaattgattgatgttcccaggatttgttctttcaaagtgtgtctgagccacatagaattgcagttacttgtgcatttctgctgcccctcttcaggtattacacccctcccccactgtcaagactcctttctcattaaccttctctgacaatgaaacaaagcaaaaataaaaggcatgtaatggggtctaagttctaggatcttgagattcaaattttgcgaaagttattacttaagatttttatatttatgttctatagtttaggttcaagtaattttgcaaggaattattaagtacataaaagtgagtaagacctttatcttggacttggtcatagaaacagactaactgatgtgtcttcaccttggatatcctgactcatctgtccttgcacattaggaggtgggaactgagccttttctgtgtctgacttgagacagaaatagttgctggtcttataaaataaattttccagtccaagttcagcagtccagacgagatccgagtagtgctggtggatattaattgagatgtgtctgatctctagcagacacgtagacacagttaaaaatcactgtgtgatttaactacacagcggtgttactagaatactaaaactaatgtcaatcaggagacatcactcagtttctcaggcagcagttactgagcatgcgctatagtgttacccagggtctgtgggtatcagattagacaagtccagagaactgctatccttagggagctcataatctaggtagagagacagcaacagggcaagcattaaaaataggtggatggcaatctgtctcagtaaggaaagatgcctacccccaagctcaacaaccagagtttgatccccaggacctctgtagtagaagaaaagattatcccagattatcctctgccctccacctggatgctgtagcaggcacatgcgacttccctactaatacagacataaatgtgattacaaaaacttagattagagggggaccaagatcaaatacaaatagctgaagagtataacacttctgcaaatttttgagagtggctaatagttagctagaacagagggaataaaaaaagacctttcagttgggttaaaaattacagagactcttgagagagtagggaggcaagctggaagcaagagttccagagagatgcaaggaccctatgagttcagtgcagtgaggacagaaatgatgtggtagggtgagacctgcaggatttgtgactgtaggacggtggttctcaatctttgggtctcaaccccttgtgggaggggtcgaaggactctttcacaggggtcacctaaggccatgagaaaacacaaatatttacattatgattcataacaataacaaaattacagttatacaatagcaacaaaaataattttatggttgggggccaccacagcatgagcatctggtatcaaagggttgtagcattaggaaggttgagaaccattggtgtagtgtctgggtgtcactgggataaaaatataaaagaagacaatctcttggctatttctggatttctgaattgagcttccaggtggctgggagagaacagagaagcaagagttaggttttgagggaagtgggataggttttggatctattgagttgagagaacataacacactttctgccttttggctagctcacagcagtggagtagggtttgtttcaggttgttatttttaaagctgtgatttattgagtctgtgctgtgcaccaaacatggtgccaattctacgacatacattgtctcatttaatcctcataaagatcctatgaggtattgctttcttctcctataaatggggaaatggtggtagggagggttggtagcctgcctacagaaacaaagctgttaagctgaaggatcagaatttgttttaaggtctgctgtggctgaacacctaaccctcgtgcatatctgccatgcagcacctatgatttgtccagaaagatatgttattgtctaggatccaggacagtgcaatttgatgaatacagaagggactatcagtggttaccagtacaatcctgtagacaaagactccatcttaaatcttatcaaagcaattacaacagagattgcataaagcctattttgagtagaaagatacttgtgtgaccatggggtaatatatgaaactaaatgaaaagatatgcaattctttaagatagttgtcaaaattgtaccttagagtatgataaaaaattctatgaggaaggaactctatgttatctttttgtacttggctcctggcctccatactacacaggaggaacctcacatagattataaataacttatttagtgactgggtgtcaggtcacagctaaaacctaggtttctttggttcttaaccaggaaacttttccaattctgtgccatggctataggtagaagtaaacaaggtttaccgtgtaaaccttgcatctgggtttttgtacagacgttgtacaaagatatgttgtagaacaacatatctttctgctcttatcattttgtggctatatgatattaattaagtctttttacttttctgtatcttcacttatacaattgtggcttaagatgcatatattcattatatacatgattattgaggaaatcaggttaggttgcaagtgctcagtgtttagtgtcttgagataatcaatacttaccactgggaaggaacgctctgttttacttaccacctacatccattgagccaattagcatgatctcaaagacttcaaatgttattctaaggctgaacatccgtggtaccctacaggtaacaggagaaatggacggggtccttatgccccacatagagacatcaacttaaacattcgatcatttgcattcccttggaaatatccttgcttttctaccctctgtgatctggagtaagcctcagttcgaattttaagtatcctttcacagtatattttaatattatttctcttttttattttttattttatattaatggcatgtttattagtactgtattggtaaggctctggcagagcctctcagaaaacagctaaatcaggcttctgtcaacaagcacttcttggcatcagcaatagtgtctgggtttggtggctgcaaatggaatggatccccaggtggggcagtttctggatggcctttcctttagtttctgctccactctttgtccttgtatttcctttagacaggagcaattctgggtgaatatttttgagatgggtgtatggccccatctttaaaccaggggccataccataacctctgaatatggtctctacaggttctttctcccctttattgggtatttcagataatgctatccccattggggtctggtagcctcttgctttcctggcatctgggactttctgatggctatctccagttccccatcacccattgctactcgcctctgttcagtttcccatccatacatctgggggaagaggatcataatttcacccattacatgatgttttccaggtccatagtcctgtccctgttctgcagtttaaagtccccccccccgatattcctgtagcactatgctatctttatagaattgattactaatcgtaatagaattactttatagcatttaatactaacactaaagtcaagtgctaacatttattgagaacttgtcatctgcctgccactgtgctaaatatgttgtgtaaagtatttcacttaatttttatagcagctttgtgaggtgggaacaattttcaactccattttacacatgaagaaatggaggctagaaggtcagagtcttgactaagcttgcctccctaggatgggatgtcgtccttgcactgaaattacaaatttcactgttgcctattgggttttttttttctttctcatattggttatgcctttctacacagttggatctgtatttgtatcctagtaactttaaattttttttttctgagttgaagaaaactgagctatgccaggacctccttggggaatgccatgcccctttgaatcccacagatattgaaatagcagagaaatggaagctctgatatctccagcagagtcacagattttggagatcttaaaggagtacatgccagttgaatggttctcttatgttcttgttgtttgtttgtactgagtgtgagggttacaaaagaggagagtctcctggactatttctgagtttctgagttgtttggtactgaaggttagaactacagtcttactaagcagtcactagcactaagtatatccccagacaaggatgctcattttttaattttatttttttatttatttacttttattaggtattttcctcatttacatttccaatgctatcccaaaagtcccccatacccacccccccaatcccctacccacccactccccctttttggccctggcgttcccctgtactggggcatataaagtttgcaaggccaatgggcctctctttccagtgatggccgactaggccatcttttgatacatatgcagctagagtcaagagctcaggggtactggttagttcataatgttgttccacctatagggttgcagatccctttagctccttgggtattttctctagctcctctgttgggggtcctgtgatccatccaatagctgactgtgagcatccacttctgtgtttgctaggccccggcatagtctcacaagagacagctatatcagggtcctttcagcaaaatcttgctagtgtatgcaatggtgtcagcgtttggaggctgattatgggatggatccctggatatggcagtctctagatggtccatccttttgtctcagctccaaactttgtctctgtaactccttccatgggtgttttgttcccaattctaagaaggggcaaagtgtccacactttggtctttgttcttcttgagtttcatgtgttttgcaaattgtaacttatatcttgggtattctgagtttctgggctaatattcactcatcagtgagtacatatcatttgagttcttttgtgattgggttacctcactcaggataatgccctccaggtccaaccatttgcctaggaatttcataaattcattctttttaatagctgagtagtactccattgtgtaaatgtaccacattttctgtatccattcttctgttgaggggcatctgggatctttccagcttctggccattataaataaggctgctatgaacatagtggagcatatttctttcttactagttggaacatcttctggatatatgcccaggagagggattgcgggatcctctggtagtaccatatccaattttctgagaaactgccagactgatttccagagtggttgtacaatcttgcaatcccaccaacagtggaggactgttcctctttctccacatcctcaccagcatctgctgtcacctgaatttttgatcttagccattctgactggtgtgaggtggaagctcagggttgttttgatttgcatttccctgatgattaaggatgctgaacattttttcaggtgtttctcagccattcggtattcctcaggtgagaattttttgtttagctctgagcccatttttaatggggttatttgattttctggagtccaccttcttgagttctttatatatgttggatattagtcctctatctgatttaggataggtaaagatcctttcccaatctattggtggcctttttgtcttattgacggtgtcttttgccttacagaagctttgcagtttcatgagggcccatttgtcaattctcgattttacagcacaagccattgctgttctattcagggattttttcccccgtgccaatatcttcgaggcttttccccactttctcctctataagtttcagtgtctctggttttatgtggagctccttgatccacttagatttgaccttagtacaaggagataggaatggatcaattcacattcttctactcgataaccaccaattgtgccagcaccattttttgaaaatgcagtctttcttccactggatggttttatcttccttgtcgaagatcaagtgaccataggtgtgtgggttcatttctgggtcttcaattctattccattggtctacttttctctcgctataccagtaccatgcagtttttatcacaattgctctgtagtacagctttaggtcaggcatggtgattccaccagaggttgttttattcttgagaagagtttttgctatcctaggttttttgttattccagatgaatttgcagattgctctttctaattcgttgaagaattgagttggaattttgatggggattgcattgaatctgtagattgcttttggcaagattgccatttttacaatgttgatcctgccaatccatgagcatgggagatctttctatcttctgagatcttctttaatttctttctttagagacttgaagttcttatcatacagatctttcacttccttagagtcatgccacagtattttatattatttgtgactattgagaagggtgttgtttccctaatttctttctcagcctgtttattctttgtgtagagaaaggccattgacttgtttgagttaattttatatccagctacttcaccgaagctgtttatcaggtttagaggttctctggtggaatttttagggtcacttatatatactatcatatcatctgcaaaaagtgatattttgacttcttcttttccaatttgtatccccttgatctccttttgttgtggaattgctctggctaggacttcaagtacaatgttgaataggtagggagaaagtgggcagactggtctagtccctgattttagtgggattgcttccagctcctaaccatttactttgatgttggctactggtttgctgtagattgcttttatcacggttaggtatgggccttgaattcctgatctttccaagacttttatcatgaatgggtgttggaccttgtcaaatgctttctccgcatctaatgagatgatcatgtggtttttgtctttgagtttgtttatatactggattacattgatggatttccgtatattaaaccatccctgcatccctggaataaaacctacttggtcagaatggatgattgtttaatgtgttcttggattcggatagcgagaattttattgagtatttttgcatcgatattcataagggaaattggtctgaagttctctatctttgttggatctttctgtggtttaggtactagaagtaattgtggcttcatagaatgagttgggtagagtaccttctacttctattttgtggaatagtttgtgcagaactggaattagatcttctttgaagttctgatagaactctgcactaagcccgtctgattctgggcttttttttttttttttttttttttggttggaagaccattaatgactgtttctatttctttaggggatatggggatgtttagattgttaacttgatcctggtttaactttggtacctggaatctgtctagaaatttgtccattcgtccacgttttccagttttgttgagtatagccttttgtagaaggatctgatggtattttggatttcttcagggtctgttgttatgtcttccttttcatttctgattttgttaattaggatgctgtctctgtgccctctagtgagtctggctaagggattatcatcttgttgattttctcaaagaaccagctcctagtttggttgattctttgaatagttcttcttgtttccacttggttgatttcacccctgagtttgattattttcctgctgtctactcctcttgggtgaatttacttcctttttttctagagcttttaggtgtgttgtcaagctgctagtgtgtgctctctctagtttcttttttggaggaactcagagctatgagtttccctcttagaaatgctttcatagtgtcccataagtttgggtatgttgtggcttcattttcattaaactctaaagagtctttaatttctttctttattccttccttgaccaagatatcattgagaagagtgttattcaatttccatgtgaatgttggctttccattatttatgttgttattgaagatcagccttagtccatggtggtctgataggatgcatgggacaatttcaatatttttgtatctgttgaggcctgttttgtgaccaattatatggtcaattttggagaaggtaccatgaggtgctgagaagaaggtatatccttttgttttaggataaaatgttctgtagatatctgttaagtccatttgtttcatcacttctgtttgtttcactctgtccctgtttagtttctgtttccatgatctgtccattgatgaaagtggtgtgttgaagtctcccactattattgtgtgaagtgcaatatgtgctttgagctttactaaagtttctttaatgaatgtggctgcccttgcatttagagcatagatattcagaattgagagttcttcttggaggattttacctttgatgagtatgaagtgtccctccttgtcttttttgataactttgggttggaagtcgatttcattctatattagaatggctattccagcttgtttcttcagaccatttgcttggaaaattgttttccaacctttcactctgaggtagtctctgtctttttccctgagatgggtttcctgtaagcagcagaatgttgggtcctgtttgtgtagccattctgttagtctatgtctttttattggggaattgagtccattgatattaagagatattaaagaaaagtaattgttgcttcctattatttttgtttttagagttggcattctgtttttgtggctgtctcctttttggtttgttgagggattactttcttgctttttctagggcgtgttttctgtccttgtattgtttttctctgttattatcctttgaagggctggattcgtggaaagataatgtgtgaatttggttttgtcatggaaaactttggtttctccatctatggtaattgggagtttggctgggtatagtagcctgggctggcatttgtgttctcttagggtctgtataacatctgtccaggatcttctggctttcatagtttctggtgaaaagtctggtgtaattctcataggcctgcctttatatgttacttgacctttttcccttactgcttttaatactctatttagtgcatttgttgtcctgattattatgtgttgggaggagtttcttttcttgtccagtctatttggagttctgtaggcttcttgtatgttcatgggcatctctttctttaggtttgggaagttttcttctataattttgttgaagatatttgctggccctttaagtcgaaaattttcattctcatctactcctattatccgtaggtttggtcttctcattgtgtcctggatttcctggatgttttgagttaggatctttttgcgttttgtattttctttgattgttgtgccgatgttctctatggaatcttctgcacctgagattctctcttccatctcttgtgttctgttgctgatgcttgcatctatggttccagttttctttcttaggttttctatctccagcgttgcctcactttggattttctttattgtgcctacttccctttttaggtcttggatggttttattcaattccatcaccttctttgtcgtgttttcttgcaattctttaagggatttttgtgctttctctttaaggtcttctacctgtttagcagtgttctcctgtatttctctaagtgagttattaaagtccttcttgatgtcgtctaccatcatcatgagatatgattttaaatccaggtctagcttttcgggtgtgttggggtgcccaggactgggtggggtgggagtgctgctttctgatgagggtgagtggtcttgatttctgttagtaagattcttacatttgtctttcgccatctggtaatctctggagttagttgttgtagttgtctctggttagatcttgttcctcaggtgtttatgttagcctctatcagcagacctgggagactagctctctccttagtttcagtgttcagagtactctctgcaggtaagctctcctcttgcagggaaggtgcccagatatctggtgtttgaacctgcctcctggcagaagttgtgatccactcacagatgtcttaagatcctgtggagggtcctgtgtataccttgtgggtgtccgcagactccacgcccaaggtaccccggtgctggcgtggaccagaagggattgtgcccctgatcaggctgggttttttgcttcactatttaatgcagtctcaggtctcgcgagattggattggagcagcagctgtgttccactcaccagaggtcttaagatcccatggtgggtcttgtgggtagcttgcgggtgtcagcagactctgcgcccaagctaccctggtactgttgggaccagaagggtgctcatttttatatatggttgttagtaattattttctttcatgtaattgcttatgcccctgcccattttctctgtgctgtgcttatctttttcacataaacttaaagtatatacttagttagtaacaacattagcccttttatgccagatgtggcaaggtgtcagcctattggggatcatggacaaccacagctacagaagttgaatcagttgctattactttacaacactccatttaggaaacattttatgggtgctcacttatctatttctcacaagcagaattagacaagtctgatagttctcttataaatcagagtaaaggttacagtgaacattgcaaggtctagaaaagcttatcagtgtggattctgagagtcactcagcctagagtcccttggaatccaaagtagaacttggctggggggttatttctatggggatctttgttgctggcttctgcacaaaatgaggtaactcacatatgtgctgtaactcaccagaaaaatgcttattttgagtttattaacagtgaatatttgttgcaccagtgggtggtataaaccattcttgtagatgttgaagatttaagttccttcccctagggagtttgtgttcctaatttgcatgcataacctataattaatgtactgttcaccattgtagtaccccatgtttgggacaggatcctcagcattcttatattgaaaatgttgtgcccctgtgcccctgtcaaaaatcatgcttgtgggttttttttttttttttttttttaccgaggagagcagaggtacattctaagggtgccaccaaggtgaatcatcaagtgacaaaacatggttgtaggtaaaagtgaaattgtacctgggaaggacccatagttgtccccagatagttcagttcagataagcgaggccaaagtgtgaaaggaaaagaaagagaagtcagcaagcaggaccatcacaagagataatggaaataaggtcctattttataaagatttatatgctctgaagataagctggaccaattaagtcatgacatcattgagtgcctggtgatgatgaagacaccagcgaaatgtaaaaatgtccccattttgtattggaagattttacacatatggaatttctgatcagctacattcttaagtagctgtgatagtcctagtatccctaggtaatactgtaatttaatagagattcaagactctgataatcttatatgtatgtggatgtacatatatgaatatgtatgtatatacatatatatgcatacatctacacacattcatacattcatgtgttgtctctaatatatattctctagtctttgtccctctgtaaagtattcaaggatctcatgaaatacctatatcattatatcaatttgctttacttggtgactaaatttcaacctatttcaagaatgtttccaccttagaattaattttacttaccttctttttaaatgagggaccaattttttacctgtagagtaatatgaattgaagtaacatgtagagatgcccttgctatgagatgattgtgaatttaatttacccacctaatgcaaagtcccaaagtgtacacctgtacctatcccttagatttctaacttaggatgttccaaattgaattcagtatctcattgttggggaacattgctattaagatggcagtccgccatgacaggatggtttctgagctcagcacaaaatgtggggattctctttctcagtggaactttgcctgtctttgttgaaaagtgcctagacacaggtagctggcctcttcaggccttgactgaaaggtaaccttgtacagagctttctgcaaggctgcaaaactcagcacacacatccaactctggctgaaggcccacaagataattaggtattgcactataaccaatcagcccttcctgctaacttgatgctgtgacctaatagcccctttatacttgtacccataaaaaagcccttatcctatccctgaatcagtcaagttgactcatctggctgcaatggtctctcgaggtctctctgtcattccacctctcctctctttgctcaggttggtagccaaccctcttggtagaaagcgggtggggacacatctcattttcccattctaccattaaacatgcataccaccattcattattctctctctctctctccccgtctccgtctccgtctccgtctccgtctccgtctccgtctccgtctccgtctccgtctccgtctccgtctccgtctnnnnnnnnnnnnnnnnnnnntctccctccttctcccccctctctcccccttccctctctctcccatgctttatcattctttttatccaagatgaaatatcttaactaattttgattctttctcttatttattctctgaacctacttgtttatccagacatgctaatcctactcagaaatgtattgtgaactaaatcttggaccattctggactctgagtattctccctgcttttggccagcctgaaacccaggatgaaaacagttagttgcagttttgtttacctttgttgcttattatggcttcatattgcttaagtaatagaaccatacctgtaccctttatttaattaggtctttaggaaatgggtattgatcatctgtgtgcagtgttctaaatgttgggaacattaaaaaaaagcaaactaaagattcttatcctcatcaagcttgcatttgtatcccaggagagtctaaaaacaatgttataatttagataagtgaaaagacaatacccctccctttttaaagaatactgtaaagcacaagggatacgtttcccttattttagtctttagtgtagcattagagtatgcgatgaagatttttttacttgttgaattatgttgaaatttacttgaaaattatgtaaatatttttggataagacatttcagacaaagaacaatgggaaacagattttttttaaatctatatgtgataaaataagttccaaagtaaaaaggataaaaacagtagtatattctaggcgtaaagggactcaaatacatattatggatttatatatgaatttataatatataaatcatttgaaattggtgaaaatgaatcattcagtgaatggtattgatgactagctaattactttgaaagaaaaaaatggagttggatctccatcttatgacttacaccaaaataaaatggtggtggaggttgtatattcattttaacatttaaattgtaaaatgttattttttaattgtaaaatgtttaaaaattatggagaattaaaggtattttcaagcaggaaaggactttataaacatgacataaaacaaattccataaaggaaaaaatggatatatttggatgtataaaaataaaaacagatgctataattcattagcaggaacaaaagaccaaacttgagtttgttttgaattttatataattagggaagaaagtaacacaaggaaaggtcactgttgagcaggaagactgtaagaagtctctgacttcagagagaggaccatgatccctaatggctaaacagtagaggagaaaatagcctggcagatttaggtggagaataggacatggtttccaactccacgttcaagggaagatcctgtaaacaaggatggcaacctgtgaaaaccttagagggctttgggtccatttcctgagatgaatagtattggcaaaaagagaaatcaatagtctgaaagaaagatgctttcagtctcagacatagagggtttgaggtttaaaaagaacaaaaaaatagatcagccaatatctgtatacttagaacataggaagagaagatgcgacaagttatcagaacacaacagaggaaactgtatcagtgtagacaatgtgatccaaggaaaacattgaagaaagaaaactcagatctagggatggagatgtggagaaactaagtttaaaagtcaggaagtctagactgctcaaagagaatcactaaacctaaagaaagcattgctttgtaggggacaaagatgtgtgggccttcaagagagagtaaggaaaccccaaagggtaaatgactcacagagaaccaaaaagtagctgtcaaagttggcaaatcggatctatctgtctttcttttcctttctacttagagaaaactctaaagtcataagaagatagagaaaaaagttccaaggtagcctttcctttagctccccgacataacatcttacaaggctatagcatgatattcaaaccaggaaatagcattggtataattcattaagctcatggagatgttctcagtttcacatgtcttctttgtatgtatgcttagctctgtattatttctgtcacatgtagatgtgtggaattgtcattataactaagatatgggctgttccgtcaaaagaccccatcttctcttcatagccatcctcacaatcttctactataaccccaacttcttcgtatttttaagatggtttaaggagtataaccctatgaaatgtaagattgaagtctatccccaccgaccctttctacttttgattagtatcctattatatggatgttccacattttgtttaaccatttactccttggaagacatctgggttttgttcatcttggctcatttataagtaatattacgtagctttttttttctgcacaggattttgagtgaatatagatttttctttctctggaataaatgcctaacactacaactgctataccatatggaaagtacctatataagaaacttcctaaacttcctattttccattcagagagaatttaccagtttatatttgcctatactataaggggcttgtgtttttttaccccacacatttcctgatcgtttaaattttcaataataaataatgaatattaataaccatcacaagcatgtggaaggtttaagacagtatcaaaaatgtacaccaatgacttttaagtagcatgtttcttattaaaatagaaaaataacatcacataaaagtattgagtgggtagaaaatatgaatacagagttaacaatgtctaattttggcagttaaacaatcttgaacaaacatcttaatcactctacattacctcaccatcaatcagcctttcagtgaaagagcccaagtcagtgtccctcatcttggataccctccaacctcaattctaagtttcctctaccttatccctgctatccagttgctaggtgtagatttcccagataatcatttctttgcctagaaataaccaagctataataaccatgtctatgttttgccttatctggggacctctgacttattcttcaaggtcaagttcttttcgcactaatagaatttatttaccttattttatcagactttttcccctggaactctgttcctttaacagcattatgaaggcaggcaccatagtgagttctctttccttttccccagcacttagctagcatatttaacaagcacgtgggtaggctctgggaaaatgtcctctggcaaacaaatcagaggtcaacttcctgtttgggacatctgtatctgtcagtaattgtctcaagattttcaggaattattttcaggggctataattccccagaaagcctagttcacgttagctgacatgcgaggcacagggtactgcagtagaaccctcttattctgacagtgtcaagggacacctctgcaaacagtatcatgcatcttccccttcacttggagaaagggacaatgagtataacctcagtgtaattgtgtcttttctgatatagagaccctttaattggcttcctttgttctgttgtaatttatccagtacgctcacttcacagtagctttcaaaccaaaaatcttagctgtttgagaatgactttaaaaacaaaacaaacaaacaaacaaaaaaacctggagcttacatctctttttctggtctatagaacatcttgataattggcttcaccaagaagaaacctgagtgttaaaattcattctgatcatatagtgtatagtcctgcccctgcagttagacatgttttctatgaacttgccagtgccatggctgaagtacaacctcttgctagctctggttgataatcaccgtctttacaacttggcttgtatgcttggtgcttggcatttctagattttaagttcagatgctgagagagctgtagctgaattaagagttctttattttccccctggtgtcaagtgcatcactaaattctcaacacttaattatcattgcgtcccaaaatattcctcatttagcaaaaatattgaaatgactcgttcctgttgaagaagcaagctctgatatgcagaacactgagatgtatgcgccatcgagaacccgagggaatgaatctatttgagagcatctgcagggaatagtagggaccacaaagcccatttaagggccatgtgcctcttacctgtattgggctcaatcgggcaaccaatgtttagtggcaacaacccactgtatgaagttgacagaaacagggaatcatcgcactctcatccgagtttattggagtggcattaaaacgagctgtgatttccttccccgtccccacactcccttctatactccacacaggtgtctcctctatccttttgtctctgggatttcatatcataatctctacttagatcaaggcacccaatagtaaaatattacatagcaggatggtcttattaatagccagaagcatcttattgagcaagaactggaagaagaaggtgcaagctgttggtttttccatagagtgaagtaagaggagaaacatctgtcaaaatgcttgctcagcaaatagacattaaacactcattcatgccagagactctgaacaagatgaggcctctcaccatgagcttcatattctgatagctagaaaacaacacaagcagaggtgttacaaagaaaatagacatacattggataacaacattggttcttaggaagaaaaagtggaagactcaaaagatgactgtcagcatgctatgtgtaggctggcctgacggcccctgtaggttctgggggatagatgccacacccagctcaaatgcccactccctcactgttcccatgagtgtggttttcagtgggcaatgtcagtctgagaatgtgaagacccaaccaactgacctgagcatctaattgtattaactaatctacttggggacagccctgttctttacacgattttaaaaaaaaaagaaaaagaaagaaaatgcctctcagttaccagcttaaagctgtcgtagtggattaaagtaactcagtatacgtttcagagataattatctgacaaccatggatgttccttttattgattttgttatttgacattgtcatatgtgtatatagtgcattctgatttctctctgtccccccaccttcttaatcttccccacttcccatcaaccctgcctcacccttctcaaccctacctcatccctatcagttcctctttcaagttcatgacttttggggtttttgactcatttagtttaaccaggcccatctgtgtgactgttgtgtttaaatgatccactggagcctggcagggtcattactgggtacccaaccgaaggcaaagatttcctgcttctattgctgtcctttctacttcctagacttctgtatatgcctctgtatataccttctgcatacatttgtgaagaggaaaactacattttaagaatcataaggctgaaaagagttggagggtagttcaatgtcaacttatgcatccccagagaggaagattactcatgcagcctggtactcatttccggccctcttatccagtggaattctcagaggctgaagcaaggctgtctgggttgggctgtgaaggtcagttgtagagataagtcaatcacacatacaccttctttctaggaatttcttgtctttctatccttctcaagatttttgtcatggaaaatttgaaaagtagaatttcagtttatattttaggtcatgtagctgttctgccctggcctaacagccccctttcttctcctttcttccctgttgagtggtcaatcatttgataaattgcttagcttagtgttttggactgagttcccttaaaacaaagacaaatagacaaacaaacaaacaaacaaacaaacaagaactactttaaaaaaacagattggctggtttatttgagtctttagctacaaaggagaccaagtggggaatttgaggcacagaaggggaatgaactgagaatgtacgtggagagggtcaggctcattccactggaaactttcttaggagctatgtacagtgtgtgcgggaattgcttcaccaatagacagggaaatagagaaagtgtgtgagtgtgtctgtttgcctgtccctgtgtctctctgtgtgtatatacctgtagttctatttctcccttattaattaccgacctttctcaagttagcacatttggtttgtgctgcttgtgggctgagtgaacgcctaggttttagagaaattccccaagcagagatgtagtaagatgtggacagttaaattaacatagttttacctgtcagtgtgtgcagattctgtcctccacagcttcacactcagaggtagctgtaaggataaggagtgtgtgtgtgtgtgtgtgtgtgtgtgtgtgtgtgtgtgtgtgtgttcacaactcccacttctttggctccattcaaagaatagttccttcattccatatttgttaaacatttgccatactaggaatagcttttctgaggtgattaatgaagtaaaagagcagaattgtgattgggtttagctgagacaatggaagggtggccaatggctccgggtcagccatcacaagcaccttacaaggccaggagataggtgaggtgttatgctctagccatcggggtggtgtggggcagtcatgagctggacactctggccaaaactgcatagaccagcaagagtcctggaaaatgtggttgacattgtaccaccccgttcctgcagcgtaatctcattccccccacccactcatcaatttataccttgacatctgcttggagtccttggtcatttctcttctgccttttcttcttggcataccctactccattttatttcagtctgcttgtgtcctgctcagccatcctgctcctttccaaaaccctcctcactgcagaacagagcgttctcaccatcgctaggtagctccccagttacgcagctagttccctttgggatcattttaaggcattttggtatatagagcttttatgccttctgcacttggagaactctctttgttacagtctttgacaggataagttaaccggagtctcagttgaagtactcactcaggtttaatggcacagagtcaggtcctaagctcggttggaccttacgtttaaaatgtcattggtcctttctacctatgagcttcttatccacaagtaactattgcttgaaaatatttggaaaaaattacactcaggggtaggagatagctcagttaggaaagtgctccacatggaagcaccgggacatgggtctgatcccaaaaacatacattcaaaaaaaaaaaatagagttttgtttgacactgcacgtttgtaacctcagcccagatggatcctgaagggcttgctatttggtgagatacaggctagggactctgtctcaaaagtaggtggtctgtgcttagaggatgacatctgacaccaagaatgtcctctgatttccatactcatgtgcacactgtgtaccactctcttgcccactcatgtgtacacacacacacacacacacacacacacacacacacacacacacacaatgcatacacatacatataaacatgcacacacatgcattcctatagactgaaaattcacttgtactgaaaatgtaaagatgcttgttattgcctttattccctaaataatagattgccaatttgttgagggagcgtgaacagatagcacctgtagatatttgcatgtagggtattgggtatcctacagccaatttctcacgatgatgaggaaaacttacaccagttctcactacccagagggcttgcatctgtcaggttcatgtctattcaactaagaatccctgtgtcgattggcctgttatgctcccttgacctggttggtgggcagtgtaacagagcatgggctgtcaggaggaagagaggcctctgccataggccatcatgtgtatgcttactctcattgtcttcccctgggttaccagaatcccagatagtgttattgcagaggtcctccaggttgtcaagcagctgtgtggaccatacaactgcctcatctcctgggtcctggttataggcggaagcatgcaaccctccttcaggtgattgtgtgaaccaggtgggaagcatacttcttgacttcctcagatggtttgcatcccacgtgaaagttcaggttctttcttccctgttttgattccttttccttctcctacttgcctggttttagatggtaaaggttaaagctatataactagacaatcagtgcctcaaattttcttcatcgaggtatgtctcctccattcattttggtaatggtaggtcctctgatctcaaggggaaaccccctgtaaagcacatctgagggacagccactttctgtctcctagagttatagtcctcttgaatgtttctgagggctagacgtgaaaaacaagacacagcatgtttgcggtttatgtaagcaggaagaaatatatctgttccctgcaggagagagaaacacagctgatggctgcttcccaagccttgctcccaaacaccacagaccactgggagcctaggaatattaacatgagccatgaagatggggtgatttcatgtaaccagtcaggggcatgctgtactgaaatgtagagcatgtgaggaaaaaaataattacctgacagagataatggtcttactgtcttctgcattttgcttctcatgcaaaacacatacgtggtaagaggaggagagggagaggagagttcatgaaagggagaagaggaggagaaataaactttgaaaattccggttgccatggcaacataatgagctccaaaagtggcatctctgaaccagttttgcatgggaagataggggagcccagaagggaaagaattaaaataataaaaacaataaaactgcgatcatgaagtaaaggacacaggcaaagaggccaatagcacttcccagccgagtctggaggcctggcttgtcagctgcttgcccccagctggccatagctgaaaaggtgtaatctatgtcctgcgctggatgatctcaccagtccctgactctggacgatgtgacgctaagggattctgacaaagaagaccctgtgaattatatgtggaatgcactctgctccagaattgtcgagagcagcaggtctcaaccttcctaatgctttgatcttttagtatagtttgttcctcatgttgtgatggcccccagccataggattattttctttgctactccataactataattttgctactcttatgaatcgtaatgtaaatgtctctgttatctgatggtcttaggcaacccctgtgaaagggccattcaacctccaaaagggtgatgacccacacagtgagaaacactgttctagaaacaaggctgtgatcttgttctgttcctccctggctcctcccttccctctgccctttcttataaagagcctaagtgtgttcccttcagtgagcttcactgaagtcctgctaccagtgaggctgccgcatcactcaacccactagctaggacaaaaagtccctatgctggggacttactactccagatggctctcctcttcaacatgccctagaacaatacatgctcatatgaaagaaggcagcactgaatgcttaaaagatacagaccaagaaagatttgtaggctgtttgtttgtatgccatactcaaattgaaaacgaacccaaagcagattagaaatgttacttgtaacataaaaaagatgtgttttaatgaagataccccttgatattctattgttctcactcaatagtgttcatttctttctcattagaatgatgaaggaatttgtaatacataccctctcatcatgtaaccattgtttatctagaaacattttgagccaatctatcaattaacttgttcttagaatggttgcagttggggatcctgctgccaccttgtgcctacttgatattggaaacctaccaatatttgcctgtattctagtacggctcttccaataagcagtgtgtctgacagatgccaattaatatgtttgaagaatgaatgaatgaatgcatgaatgaatgaatgctttatctgaattaaagagtcagatcctcattatacagtgccataacttgaattaaacatgtcaagcttgacagaggatatacagatgaactaacatattacaatgagtacaatgagagtggcaactctctctctttctctctctctctctccctctccctctccctctccctctccctctctctgaaataagcaaatcgtttaattgattatattatatctattaattttatagccccttttgtatattagccaggtaagtagttaatatttatataatgagttctatactttagaacaattaggggatgaggggaacttccttttccttgcttccttcagaaaatgattctggtccccaccctcctcacacataacatgtgaacatagaagactggctactcttggtcctttgtatccatgagctgtaaatctaaagagtcagctaaacttggatgagaaatatttgaatgcagtaatcccacctgtaccaaacatctatagactgcttttcttaatcccataaataacacagaccaacaactaattacacagaattcactttgtgttttgtattgcaagtgaccagagatttagagagtccaggagggtgtgtgtaggttaagtgtcactttatagaaggaattctattattcaagggattgaacatcagtggacattggtatgtgctctaatccacagatattgagggctgtgtgtttctgattctttctcctattaggctggtttgagagttttgaaggttttgaatgggcccttactaaaagaagaagagataccctagtgtgatggttttggattaaaaaactaggaacattaacccatcttttaactgcatacatgactgttagcaatgtttttcattctttgggggcctcagtttgtcagtctgtaaaatgaatattataagacgtcaaaggctatcactgattaaattggagactgaacctagacaatgcctattacagtagagctgtctagtagcatatgactttgatccttaaggacctcttaactcctgaagttggtactaaccctctttactgcgaagttaagggtttgtaagagcctctgaacatctaaaaaatgataaatgctattattacatactttctctcttgtgtttttttcatatccatgtataaatccattagtctaggaatggcagagctgcccaaacagatcacagtcatctgcataactggaaagtggatttatgaaagacaaaggaatatggggggaaattaaaacagagaaaaattaacaaaatgacccaagtaaccacagtagcaggaaaatgttttatattctctatttaactttcacgaaaaaacttggcaagataggtagtgctcccccctccccccaaatcacaagatggacaaaaacaggggctcaggtgcttgtccaaggatatcctgctgggaaaaggaggtctggcattttaacttaggcttttcttaatccaaagcatatgtactttgtttgacaccctgctgccttctcgaaattgcacaaagcaacaccattttttcagggggaggcacactcatggggcttactgatctggacagttgaggggggactaagaacataattctggaaggtcactctgatcacagaaaaaggaaatctgttaagcagagaaacagggggaagggtatcctctaccaggagattgcttctgtgttcttagggatgacttgatctaggtggggccaagaagctgagttcacattcacaatgctttttcaggacagtacttgagggtcaagggtcctggaaaagtctgttcacatcctgacctgtcaatggccgagcaaagaacatgcttgactgagaagctcaaagggcgtggggttgacaagacaaacccatgatcaggaggggcccaaatgtatgaagccaacattctgaagttgactctctggtttcaggaggccatttagagactagaaagcaagaggtaggcaagggaaatcagaatttataagggaggaagacaggatattcagaatgggcccttgtgaggtggcctgggcaggtttttcttaggcagcgaatatcttgaaatatttgcaaggactgaggttgatgtgctatggtgaagaattctccagacagcatggggtagatagaatttgagttggagcgaggctacaagccacaaatgtggcaaccacatgggcccgagtgagtgaaagctaccacactggggaaacatgtgggctgcaaagcaacagagccaagagaggcaagagctaagtgttccctagctcatgttctctgttctgcatgcacactagcctaggtgaccctgccttccattctcctgcttcctgacgggaaaccaagaatgacttttgcctattacctaccagtcatagggccattcaacagcaaaccttaccacaccctgtccatggtcttcatccttctcagggaacacatgttgcccaattaagagtctcttctagtcatgatgtgttagaacattttatgaggtctttttcttcccttaggtttctccttttccagttcctacatttctgaccacagcctctcagcattcctcagagtagatagagccatatttatgtcttagtgcctgtgggtactgtaacacaataccacagacttggtgccttataaactaaggaaatatggctttcatatcctggaggctgtaagcacaagatcgaagcagtggtagactcagtggatgccgacccttttgcggtctacataagacaaagcagacaaatgagctctctgggtgtgttacaaaaagtaattcacccacaaggatccatcttcacaacctagtcaaggtgcaaagactggcctccagcaccatcattattggagttatgatttcaacactgacatttaagaaggacacagacaaccatagcagggtctagagctaatgggtcaaaggacctcaccacagatgccacttagacgctcaggctgaccttcattgctgaattcagcgagtcacattggaggagagctggaagggagcataggtaggtgatgactcagagcagatgtgccacatggcaattctgcccacgtttcatgagtcggagctagtcacctggctgtctaacagcaaggggaaaagaacagcttggaagaactggatgatcttctcttggtctgggagaaatgccgggtcccccagagggagtgttagctgcctgtgccttgtataaggtctcatttgccacctcagctaccagctagccctgtctttagggtcctcggatcatatcctaacacttggcctttcctgtgccaaacagccctccatgtaacccaattttcaactttgagatccatctgaggtgcttttattccagtacccccacctcctctttctaatgaccccccaaccccatttagttatcttggggagacagttctttggaattcctggttcttcctttcatggtctgcagaagccttttcattctctgagaaatctattgacctttccatcctcctgtctgtttttcagtctctttaattgtgttgcatccgtgtaccaaatgacatcatctccccatctatagttcttggcacaaacataactaatttcctaaaaaatagatctaatcacgcttctcccctatgtgaaaccactatggttttcctgtaactcacagaataaagcgagtcacatggagtcaccagagagataaaactgttgacaggaactagatagacatagatttgaatcctaagttgctacccactagcttgagttatgtaatatcactttccagtccatgagacaaagataatttcttctccacaggattgtatcatatgtctttcattacacatgtctgccacctgattagtgagggactctggaaaagtcatctaaaacacccaattaaaaacctaggctattgggcttgccattctctggtccgatctgtctcagccacatatctcctgattgtcatgggggaaagaaaactcaggagaattttgctctggcaatgaattatcttaaacatacctgacataactagtcatgtgattccattcaatagcatggcctagaagacaaagccaaaaatatttttatgagcaacattgataactgaccctttgggctacctctagctggatcaagctctgatatttgggttccatgactgtagctcaggtaatattaacacattttccttagtctacttctgaagaggatggcacatacatctttaagacaagagctgactttccaagatgctctagctagaaagaaagtgggtgatgttttagtgacttctgtcagttataggtaagaacactgaaggaccgagaggaataagatgtccaccctgctatccagccgactctgagcttcagcctagctatcctgggctatcatttttcccttccagctattccctatatctggctttatttttttcaggggctagtttttccactcatttcctgtatagccttcaagatacaatgtcttggacaccttccccagctcatcccacagaactgaatgttctctacctccatttcatcaagcccatttataacgtttaataagttttattggcttatgtgtctgtctccttggaagattaaatttacttgcataccacgatggcatcttcagtatcttgtattacccaatctagcaagtgattcttttaacttgtgactctggacaagattctgtacccgagtgacagggaacagacaaataacaaacaaaccccaacaatttctgcaaccacacaaacatgcaagacagggttcataccaaatcctctggcttctggctttttaaaaactgagtcagtttgtcattcagcagtgcggtctggccatgaaatcctgccttggcttctgagtagccaggactggatatgcagatcgagatgtgcagcaaagatttatgacttcttccctagtcattttccactgcttgtaattctccagtgtcttataggtatgtattcaatacctcagtatggggcttaagagaccgtttctgatcagattgccctctttggtcttcattagcttggctgacttgctttgtatctgcttgatgctaaaaccacatttccattcaagatggattcttcccctaaagaaaaggctttttacaaaatctaattattttaacctttttagtgtcatgctacagaaaacaaatcggctaattctaggttgcagtttgacagcttttgaattaaaggagtctaaatggctttgggggacttaacgtattgcaaagactgagttactcctgagatcgtttgtatgaaaatggtttgtaaattgtgaagtggcctataagtatgatttggaacatcagtactcatgtatagtatgtgctgaatgagaatttagtgagtgaatgaggcttcttttttccctcaggcatacgcttttgaagagaatgcctttgctttgctgggccgctcagtcttctttacatatgtcatgggagttttccccctccattcttttctgtttccccgagactgtgtcctctgtttgaccccatttattgaatatgaagtttcaattatatccaggttgtagctcagtttgatggacaaaacataaataaaattacttttaagggactctccaagctttgcttaaaagaaagtttctcacaggttacctctgcctcatagtgcttttgatagggaaccaaggatggcaagtatctgatcaagactggagtctaggctctctggcttctttgtctacctatcctagtctactgaattttctgataatcattgttcatcatttatctttttgtcttcacttggtgataagactatggtctctatcccttattagttctctactcctctaagtctgcaaggctatagaggccacgggaacctaggctctagtatttagttcacagcttcatgtctctaagtgctgacccttctggctgatatactctggttcataggaagatgaggatacctctgatatccaggcagttcatcttgggttgctgacggtagtaattatgaggcctccccaacccagtgagggcagtagaatcatgggggaattacccactgtctgaaggtatttaagaaggagggttattgatagcaaaatgggagtactcagagaattctgtatcagagttttagaattctatcttaccttaaagatggatgaagatgttggatgatttatgatgattttcttttgtcattgactactggaattatcttcatagcccttgttgattggcaagattggaaatatgcaatagagggaaaaattaattaatttcccccttcattcatagattttgagaggtggtggtggtgggtacataaagcttctgttgaaaagaagggtacaaccatctaacctttaggtgctgggtagggactgaaactacgaattaattgggcagtaggggcctggataagaactagaacaaatgtcatattcatcctagttatctttgtcctctaatggactgttccaattccccatccttccctttaatactccctcagtgaatgaagatatctgtacttttatgctcttatggctcactcagatttagggccaactccccactggaaacatggtttgtattcattgatttagtgggtggaggttgtcaagaccacctctccggtgactagagcattgtcttcgaagaagcaatgtgcccatagtcaggagaaaagcagcttaagtcctactcaggtaagtacaaggcagctgagctccagagactatggctacagttatggatgtagctggcatatataatttcttggggtggaatatgtttataagagttttgtaatcatctgtgatagtatatggtatattgcagtttccagagtgccttgattatatttattcttttatctctctcataacgtcaagagaaatcattgcacccattttgtaaagagaggctttattgatgacttgtgtggaatcacataactcaaaaatgcccaagtagggacttgaagcaatcccttcttgtttgttgctttttctcttactgttcaactctttcccaaccatgaaaaactattttttcatgaccatggttcactgattaaaaacaaactcaatccaatcaacatatccatcacttcacatcttctcatttattggtggtcacagaacattcaatatcttgtcttactatgctgtataatagacattcagaatacatttatgttatttaaagaaactttgtttcatttggccaacatctcgtttgccttcccacactaacttatggtaactaatattctttctgtttctaaaaggtcaaaattttagatgtaattgggatcatatagtatttatttttctgaatgtaggatatatattcttcagatttacatccctctaatctaaatgcctggcagacactcttaaggaaagataccttttggctctgtttcagagggttgggtctatgatctgcttgctttgtggctggggacctgtggtaagagtgtggtagatgaaagtcacacaggggaaagatgattacttcattcagccagggaaggagagagaggggtggctagaatcctgtccaagagatactcttcaaagaagatttatagtaattcacttccttcaaagaaccattcagtatgaactcattaatggatgaactcattaaagtgtttaatctcctcataagtcttagtgtttgaatccaccaaccagggactcagtatttaacacacaagctccagagagaatactttgtatacaaaatctgcctgcctcagttatatataaaacacaacataatggcctttaaatttacctacgatttcacatatgacagaatctcttttcagatgcaaaagagtattttgttgcatgtgcatgtgcgtgtgtgtgtgtgtgtgtgtgtgtgtgtttgtgtgtatctcattttccttatctactgttttgatagacacttagattgatcgcatatcttggctattgtaaataatgctttaataagcatgtgagtactgatgtccctctgatgtactaatttcatttccttggatatataccatgtagtaggattgctggcgaatctggtagttctctctttaattttctgagcacagtatttctttaatggctatactgcttatagcctcaccaacaatgcacaaaagaacctttcttcacattctcaacaaccttagcttttgtcattttgaaaacaggcattcaaacatgtgtagtgtaatagctctttgggattttactttgcatttccatagcaactaatgatgttgaactggttttcaaatacctgttcctcacctatatttctgcttttgagcagtatctgctcaggtcctctgtctaatactttgtcagatgtgttttctttccccgctgtggctgtcttttaaattgttgtacattttagatattgatccctcctcacatatatcattggctgatactttctcctattctgtacgttgcttctccatcctcctgcaatgttcatttcttttggtactcagaaggttttttaatttgatggagtgctgcgtgtatgtggttttgcttttgttactggtagtttggggtcagagtctagaacttagatgcctagaccaatgtgaggaggttttctcttgtgcctttctagtaggttttagtctctcatcgacatctctatcccattttgagttgatttttgtgtggtgtgggaactcattttcctgcattatcacactcaggctctctagcactgttccaagaagatcatctctttcctctgttgcatatttttgctacctttgttgaagattaatgatcacacagatttatttctgggctctgtattgccttggtttggtctgtatgtctatttgcatgccatggccatgctggagtcttgttttgttttctatacttgcttgagaaacgatcttcttatgttgcacaggctagtttcacagttacaggctgcaatgatccctctgcctttgcatcccaaggagctggtattgcaggcacatgccacttatccaaatactatgtggtttttgaataccataactgtgtaatttttagattgggcaacgtggcagtttgttctggactatgcagtactttatggctgggattgcttctttatatttccaaaagaaatgctattagaacttcaagagattatatcaaatctctagattgctttgggaagaagagacacattaagagtgccagcttttgtaacccaggaatacaggatacctttctagtccctgtctctccttttgattttttcctcggtatgttatagcagtaggcatgctataagagatcatttacttccttgagtaaatttgttcctccttttcatactattgtctgtgggaatattttcttgctttgtgctttttagaaaatgtattgttactgtatatggtttctatatgttgattttgtattttgcaacttggctgaattttattataacacttttgttgtagcaatttggcattttctgtatataagattgtgtaatctgcagatgcgaatgattgtattccagatgtctttctttgttgttctcatctaattgctctggctaggacttcctccagtaatatgttgattggaagaagcaacagtggatatgtttgtcttttcctggtcttcaaggaaaagcttttagcctttggccatagagtaaaatgtaagcgttgagattatatgcgaccttactagtggttctcaacttcctaatgctgcgaccctttaatacagttcttcatgttgtggtcatcctcccccatccataaaattattttttgttgcacttaataactataattttgctactattattaatcataacataagtaactgtgttttcctttggccttaggtgacccctttgaaaaggttgacccaaggggtcctgacccacaagttgagaactgctgttctgtgcctaatctattgagagctcttatcttaaaggaattttcaacaaaaaagctgatataatttccttcattctttgatgtactatatcaaatttattattttgtgtatgtgtatcatagtgaagaatctttttagtatcctgttgaaatcagtatgttaatatcatacagggtatttttaccaccccaaaaatctctctgtgtccttcatattcattcctttccccccaaactgtaggaaaccaatatttttattgtctatggttttgcctttgtcaatatttcatacagttgaaacagtccaatgagtagcttggttaatttgctatagctataacataatacagtgggctgtattatttataaaaggaagaggtctatttgccccaaagtcctagaaattataagtcctaaagtcggtgtccatattgttataggcctcatactataccatatcatagcagaaagcacactggcaaggaaagacatgcagactgaacttgatattaacatttagttgtaactgtgaactcagtcttaagagagaactcatcaccagaataattaactcagtcccacaagaaagacaccccttttgaatatttattcatccatccctgaaaggcccctcccaccactataatcatagtcaggtttcaacatgagtttataggggacacatcctaatctaacagcctttttcagattgaatttttgcacttagtaataagcatacatttatgtttggccatttcatggtgtaacagatcatttatttttagcgcaaagtaatacctcatttctttttagtactgaggtctggaagtaccaatttttctaaaactatttacctactaaagggcatcttagtgactccctacttgtagcaattatgtataaagctgctataagcatccatctaaaggttctgatgtagacagaagttttcaattccattgggtaaataccaaagagtataatcgctagatcatatggcaagaatgtttaattcccaagaaagtgccaaattgccttccaaagaggtggtgtgtgccattttacattcctactgtctatgaatgatagttcctgctacttcatagcctcaccagcagctgatgttgtcagcattacacattctgaccactcttgtcagtatgtaatgatgttactgttgttttaatatgtacccctcataacatatggtgtagaacagtttttcatgtgcatgcctaccatctgtttatcctctgtagtgaggcgcctaattaagattactcttaatcttgtttcttttcttgttgttgggtttaagagttattggtatattttagatagcattttttgttttttgagaaagggtttctctgtgtagccctagctgtcctggaactcactctgtagaccaggctggcctcgaactcagaaatctgcctgcctctgcctcccaagtgctaggattaaaggcatgtgccaccactgcctggctagatagcatttttttttagaatattttctcagtttatggcttctctcctcatcttcctgatgtctttcttagagagaagtctatagttttaatgacgtatgcttagctcccccctccctgggtgctttttttttcttcttaaataatatttttggtggcttttctaaaaactcattcttacaaccaaatccatctgagtatattcttagattgtcttctagaagttttatgatgcttttcattttaggctgaagttcatttgcttattccaattgcattactccatcaaaataccacagatcaggtaaatttgcaaatagtaattgataaaaactataaattgtttagttctaaagtatggacatctaagatcaagaaacaaatggatttggttgtagggtaaaggatctcttctctcaagatgatgccttcaggctgtatcctcaggggggcagaaggagaagggccatctggaggggcagaggttctatgcttcatgacacagaagacagagtgacagacagaagatgtgaagctgtttccctgcagccttttataagactccggtcttctttatgaaggcaaagtcctaatggctatttacttcctggtggcctgtgttctcaataaagttgcaacatttaagctactgcatctaggttgtttttcaacaaaaccttactgtgtagccctggcttacttggaagttactatataaaataggctggctttggacttacagagatcttcctgccttggcctcctgagtgctgggataatggtatatggcacatgccttactttgttgttgttgtttgaaatgttcattgatttatacaatatattttgatcacatctggcaaaaaacaataacccattgagcctattagtgatgcacatggatgtggtgttatctcttggtaagtaaaatcatgccataggccatgcttgatataaataaattgtccaccttctgtagcatccttcttaagcatccctcacttagggatggggccttagaatcacctactctgctagaatttttaacattctcaatctcatacaaggagccacagttcctgtgagttcatggatgtaacagccatgttgtgtccagaggcagcatttcatagctctcctctccattctctagagctttccttctttctccaaattcttttctgctattccctgtgacttggcaggggtatggagtggggacaatagcaatgtcccatttatagccgatcactcactgtcatgtaattcatagcatattgagcacttaggaatctcttcattagctagtatccatggcaacaagaagcctgaggttgagagatactcaaatctggatctcctgggctatgtggggcagcacttgagttaaacttctatggaaacttaaaactctataactatttttaagtttgtggaagtccattctgacactgttgaaaataccatccttgttccattgtgttgccttgggccctttggaataggtattcttgtttgtgtctattactggaccccaaagtctggctcacaaattcatctgcctattctttaacaatactacattgattcgattactgtagatatatactaagtcctgaaaatagccattaactctgctctttctttaacagggtattacatgctcttttgctttggcatataattgctagataatttggtgttccaataaccacagaactactttctgggagttttgtggtgattacagtgaatatgtgcattgggttggaaagaactggcctcttgacagtattgacccagcctatacctcccaacaattttcttatttgaatttattcacagggttttttggttttattcgtgagagttttgtaagttttatatatatgttatagttttttaaaatcacatttcatttttgagatgctaatgtgaatgacacattttaacttcacatttaatatgttcatttatgatatatagacaaccaattgttaactttgtgcttataatctccctaattggttattaattctaggagtgttgacatttaaatctttttatatacaagtgagatatatatagtctcttggaacttctttaaagacattgtatttggcatgaaataattttattttaattatagatttactttttttaatcttgattttgtattgaattgttcttaatgaagctgcatgtctgaatagttcaccagatctaaaaaaatcttacattgcaatattttctcaatatttattgcttttttggagttatgagttgattttttcaggatcttcattgtctctaatttccactgtacaaaataaaggtatctatctatctatctatctatctatctatctatctatctatctatctataactctatttatacagatacacacacgtgtgtgtgtgtgatatatgtgtacatattcacacttatctgccctattcactgacatttccttggaaatgtcttctgctatgtaacttacctgtgaaatataaatattaacaaaattataaaaatcagagatgataaataaaaagaaaaaaatcactgcagatccaggagactaattattcactatatactttaaggatatataatgaataattttcttcacccaatgtaatggcttagatgacatttcaatctctttgaaaatataaattactaaaagtgatataacagaataaaaatctaaaaaatgtatctattaacctacatttctaatctaaaactttctatttcaatttactttgttttacctagcagttctaccaagctctgagaaagaagtaatgatgttctttcacaggctcctttctttttttttttttaaattggatattttctttattttcatttcaaatattatcccctttcccagttccaaccccctcccagaaacaccctatcacatcctccctcccctgcttatatgagggtgttgtaccagcttgttccagaggggttgtaccagcttgcattcctaccagcaacacagtatcccttcaaatgcagagaataaatgacttcccaattcactcagtagctaccaccacctcaacacttagcctctcaactatgtcataagaaataaaacctaaattgtatccattatgaactggggtacaaatacaaacaacaaaatgttacccatcaaatctggcagaatataaggacatattattactaaacaatttttgattgcaagcttcatttatcatttgcaaaccaatcatcatgtataaagaaaagggcttagaacatctcaacacaggcaccaaaaggacttagcaaaatttaatcttcctgtttaataaaagttcatagtgaattaataatagaagataacattcttggtctgacaaaaggacatctataaaaaacctactgttggcctcagacttgatgctgaaatattatgaaatattgatcctcttctctgtaatctagaaatgtacaaagttgcttttgccacttcttttcaactcattgttaagtaaatttgagccattttaataaggcaaggaaggaaaaataaagggtatgtaaaattaaaagtgaagaggtaacactgcaagcttttcacagcagacatgatttatactgtaaaactctaaccatggtctctccataaaccactggagctggtaagtgagtttagcaagatcacaggatgctgatatcccgtgtaatatatacaaaaatacaaacatcctttgtaaatatacaaaaatagttggactatatatacttatgcactcataattatcaacttcattttcaatatgtgaattttaataattttaaaagtaatagtcaaatattcaagaataaataaaacatctatccatgcctcttcaaccaatataccgagcatactacagtaaatgaaagaaatcctaaagatgagcagaacacacttatggattgaaaatcataccagtgttaagcaatctgttatccctggactgatgtgtagtttccacatagtaatagtaaatgatatattagatctagtagtaccaaaaaacaagctaatgtaaagaaacagacaagatgattcaaaaatagatatgaaatacatgagctttagcatagccagaattattttgaaaaaagaacagtgttgcaggacttccatcatttggttttaagagttaccaaaatggtaatataaccgagacaaaagtccctcttttgtacagttggtgggttaatccatgagaacagaatggggcgcctcctctgttgtgtgggtggccagtttttaaatgaggtacaaatattttaattaaatctgcttcgtataactgatgctcccatggaaaaaaagaaaatctaaagccttgtcttttccagatcaaaattaatttgaggaaaatctttgaaaagttggagaaggaaaatttacttgaagagaatgtaaaaaaatcccaggtaatgcagtgagcagtgggagtccactctaatagcttccattgggtagcctttgttaaagtttgaaaacaaaagtttggctcatcaagatggacccttgagagataaacacaatggactaagggaaacagccccatcagatacatctaattttcagttttgactttggacattgtgctactttattatgagcttaggaatacattaattaaaatgctcattgcctgagtattttgtgtgaaaagattcctctccctccccccagaacatgtatgaatcattctgtcagaagaaattggttctttgatctttcatgttccttgcaaaatgtacccattttctaagtagcagtaggtaaaaatacagtcagagtgctaaagaactaccttacttcacaactaaacaaggttctatagctaaatctgatccctttctttggaaagcagagcctgtactttctaggggcatggctaggaggcattactacagagcaacagacaaacctactgtaaagaagtaagctaactctgaaatgaaggaataggcaaggatctgggaaagaatgctgacatgacatttacctctgagtgtcagtttttataaaagacaggttctggctatacatgtacccatatgtgcacatgcacttctttccctaaattcaggggtaagcacatttatgcagaaataatgtgttttctgctaagaactatgtaatacttaaactttgaatgcatcgtgacatttgtatgaggtccgtctaagagatcagtgtttattagcagaacatgtttacttgcaaaataatacagctgtttatgttggttaaaaatcagtgttgttcatagaaactcattctagtaacatctatttatgatataagggcaatgaaagttcccatctccctgtgcaagacaagaatgtgagttaaatgcctcttcactgatccacccttcaacatctctgagcaggatgagcgtaatagatcctatttgcagtccaggggccatggtgacttcatagtctagcctgttagctgagcatatcttggaggacaagagacagaagtgaggacaaaaaaagaaaaagaatggaggagaataaatgataccagaggaggagaagacatagaaagaagagaaaaagaaaagggcattgaaaatgctactcatacaccctagggtgctgagtcctgcaggtctccttgtcctccttgtcctttcaacctactggggtcagaggatatgattttgccactgcacgtgtatatgacctttgaaaagctttcaaacctctcttggccttgttatgtgtggtggagggtactgagtgtggacttcaggcctcatatatgcttgggaattgctctctgactgagctataaccctggtcctttttaccaatgaaagaatatcatgtattttgtgaaagttaaatgaggcagtccttacaaagcatttattggcatttctggagcatcaaacccaaactgaagggaactcatatgatgacctcagtgccacactttcttgccacaaagaaatggatttgctccagggagtctgtcaaactatctgtggtgaagaattactttttgaaatctccagtcaagtgtatgtgatatttttataaaacacttttattccaaaatggattaccagaaaaaaatgaaagtacaaagagatataaaacaaaacccctaatttttattctttttttttaattggatatttctttatttacatttcaaatgttatcctatttcctggtttgccctctgaaaaacagtctccccctatttcctcctccctccccctgttcaccaacccacccactcctgattcctgaccctggcattccctcacactggggcatagagccttcataggacaaagtgcctctcttcccattgatgattgactaggccatcctctgctgcatatgcagctggagtcatgagtcccaccttgtgtgctctttggttggtggtttagtacctgggagctggggggggggagtactagctagtttatattgttgttcctcctatagggctacaaatcccttcaggtctttgggtcctttttctagttccttcattggggattctatgcttaatccaatggatggctgtgagcatccacttctgtatttatcaggcactggcagagcctctcaggagacagctatatcaggagtcagcaagcacttgttggcatccacaacagtgtctgggtttggtgattgtaaatgggatggaatcccaggtgagtcagtctctagatcatttcttcagtctctacttcacactttgtctctgtaacttcttctatgggtgttttgttccatcattctaagatggatagaagtatccatactatggtcttcctgcttgagtttcatgtggtttgtgaattgtatcttgggtattctgagcttctgggcttctgagctaatatccacttttcagtgagtgcatatcgtgtgtgttcttttgtgattgggttacctcactcaggatgatatactccagatccatccatttgcctaagaatttcataagttcattgtttttaataggtgagtagtactccattgtgtaaatgtaccacattttctgtattcattcctctgttgaaggacatctggtttctttccagcttgtggttattatacataaggctgctatgaacatagtggaacatgtgttcttattacaagttggaacatcttctgggtatatgccagtggtatagaagggtcctcaggtggtactatgtccaattttctgaggaaccaccaaactgatttccagagtggttgtacatcttacaatcccaccagcagtgttcctctttctccacatccttgccagcatctcctgtcacctgagttttttattttagccattctgactgatgtgaggtggaatctcagggttgttttgatttgcatttccctgatgactaaggatgttgaacatttttttttatgtgcttctcagccattctgtattcttcagttgagaattctttgtttagctttgtaccccatttttaaataggataacttgtttctctggggtctaatttttaatcttacatttaatagacataatatttttgtcaaattgctctgattctgagagctttccatttctgagtgtatctcatcatggataggcaatgaagaaggaatatggcaacatttttgtttcatagaatctgaacacactgtgaggagcctatctatcctgggcaggaatatatgagtagacttagttaacttgaaaagttttaaaaagtctcttcttgggtggagggtatagtctaagatggcagctccctcatacttccaaaccagaaagaatgctgtacattagatccatgtcagggattctctagagtcgcagaacttatgggtagtctctatatagtaagggaatttattgatgacttacagtctgtagttcaactctccaacaatgatcagcagaagcagctgtgaatggaagtccaaggatctagcagttgctcagtcccgtaaggcatgaaggcaaagaagagagaatattccttcttccagtgtccttatgtaggtctctaggagaaggtgtggcccagattaaaggtatgtaccaccatgcctggatctgggacttgttttgtcccagatgaccttgaactcagagatctccttaccttagtctcctgggattcatagccacgatgcctcaagatccaggtcagaaacttgtatctcccagcctcaagatcaggatcacagatgagccttcaaatcttggattgtagtccattccagatacagccaagttgacaaccaggaatagccactacaatctacttcccaaagtcccatgtgaaaagtttcttctgaagatggtgaatagttagaatggagaaaaatcactaagggttcagaaacaaagactttcccaaaagatactgtcctccctcctccctgaagctcattagtatcctcttatgatggtaacttgttaccttgagtccaaatgtctggtttaatatatcaaaatgatgggtaattcagaattatccattcatagtactttgtacttctaaaagaacatttggagcctcagattcaacccatatctattgacagtctatcatgatggaggctatgtttggtgctttggctatgtgcctgttgacatagcagcttggtaagattggcagcattatcaatgccatttgttcagaaattgaatttcagagagttatataatttgtgtattcaaagacagatgtgctaactataaacacttactttctgctgtgctgtgggtttaattatcactcataatattttgtcacttctgtttattatggccttcactttccagggaggacagcaatcaataaacatacaactagatatttcctaaatgtctatctcaagtcatctatctgttcagaacgagaatttgctcacctgcttttgcacctcttacctctaataaacaatgatatttcagtgaggtggtaattagttagcttcatctcaatgaagaatttagcctatctgtaaggccacctaatgaagttggtgatttactaaaaatcctcaattttagaaagcctttgaaataaaggttgatgatcatcaactttaggtgaaactacagaggaacaaaatcccaactgtagcagaaaatacttaggcatagcaaacagtgtctggctacaatgataccttatagctttaaaatggttttaaagctcatataaaatatcaaaaggaagataaaactgctggttctaagattggcttggttgagaatgatttattaaaggtagtggtagtgttattgattgcatcaccagtagagatgatctataagactatgttacctgtgttttttcattcagtaaatattagttgagttccttctaagcatcacatatactattctagacactgaggaaatgataagaacaaggcagaagatacccttttctcatggaatttgcatcatatagaaggatagaaagtcaagtaattaaagaaagagcctttaagtgatgtgtgtccttagcaaaatgaaacattggaaaactagagttttacaggtagtgggatagtttttgtttttgtttttatttttgttttagtgaaccagtgactttttattggtgttattcagaggagtatgggtaaggggttacttacatgagcaggcataactaaaataaaaagcagctgtaatatggaaaaacccagtctaacatagaattggtactcatgaaagctctctgagaatctgttctcacagctcagctagtcttgagcctacctagcattgttccctatccccgctcctcccccctctgtctgtaacaccaaggaaagcccttggagaatttttcaagtttaagctttcccagatatgtgatgttttattgacatcctaagtattatgagccaatacctccctccaaaagaaaattttgattttgtatttatgaaagaacccctaaagtcaaggtgggagaaagataaagacatgatccatcaaatgttttataaactgtagtaagaactttggattttaacagtgggaagctggtctgtgccagtgtatcttgggtgcaaattctgaaaccagccccacagcccccagaggaggccctactctcaggccctctagcatacccaggattacaggattcaaagatcccagaaacttggtcacaccaggatctcagggtctcagaggcagcttgaataccaggaactctcacacacctagaatcttaggatttcggaatcactggatcacagagacagctggactctgaggaattctgactcaaccaggattataggaaggacaggctaggattataggaaggacaggctccagtcagatatatagagagtagggagcactagagataatcagatggcaggaagcaagcataagaacataagcaatagaaaccaaggttgcctggcatcatcagactcccaccacagcaagtcctggatacaccatcacaccagaaaagcaaagcttgcatctaaagtcacttttcatgatgatgatgatgataatagaggactttaagaaggacataaataactcccttaaagaaatacaggagaatacaggtaaacgggtagaaacccttaaaaaggaaacacaaaaatcacttaaagaattacaggaaaacacaatcaaacaggcaaaggaaatgaataaaaccatccaagatctaaaaatggaaatagaaaaaaataaagaaatcacaaagggagtcaaccctggagtttgaaaacctaggaaagagatcaggggtcatagatcaggggtcatcaccaacagaatacaatagatcaggggtcatcaccaacagaatacaatagatagaagagagaatctcaggggcagaagataccttagaaaacattgacacaacagtcaaagaaactgtaaaatgcaaaaagcgcctaacccaaaatgtccaggaaatccaagacacaatgagaaaaccaaacctaaggataataggtagagaagagagtgaagattcccaacttaaagggccagtcaatatcttcaacaaaattataaattaaaacttccctaaccaaaagaaagagttgaccatgaacatacaagaagccttcagaactctaaataaactggaccagaaaagaaatccctcctattacataataatcaaaacaccaaatgcattaaataaagaaatagaagatctcagaagatggaaagatctattctcatgaattggcaggattaatatagtaaaaatggccatcttgccgaaagcaatctacagattcaatgcaatccccatcaaaattccaaattaattcttcatagagttagaaagagcaacttgcaaatttatttggaataacaaatacccaggatagtgaaaactattctcgacaataaaataacttctgtgggaatcaccatccctgacctcaagctgtattacagagcaatagtgatagaaactgatattggtacagagacaggcatgaagatcaatggaatagaattgaagacccagcaatgaacccacacacacatggtcacttgatctttgacaaaggagccaaaaccatccagtggaaaaaagacagcattgtttttattagatattttcttcatttatatctcaaatgctatcccctttcctagtttcttctctgaaagttccctataccctcccccccccgccccccagctctgcacccactccagcttcctgaccctggcattcccctgtactagggaatataatcttcatatgaccaagggcctctcctcccattgatggccaactaggccattctctgctacatatgcaactagagacacaagctctggaggatacaagttagttcatattgttgttcctcctatagggttgcagacccctttagttccttgggtactttcaatagctccttcattggaggccctgtgttccatccaatagatgactgtgagcatccacttctgtatttgccaggctctggcatagcctcaaaagagatagctatatcagggtcctgtcagcaaaatctttttggcagatgcaatagtgtctgggtttggtggttgtttatgggatggatccctgggtggggcagtccctggatggtcctttcttctctctcagctctgaactttgtctctttaactccttccataggtattttgctctctattctaagaaggaacgaagtatccacactttgatcttccttcttgagtttcatgtgttttgcaaattatatcttgggtattctaagtttctctaatatccacttatcagtgaatacatatcatgtgtgttcttttgtgattaggttacctcactcaggatgatatactccagatccatccatttgcctaagaatttcataagttcattgtttttaatagctgagtagtactccactgtgtaaatgtaccacattttctgtatccattcctctgttgaaggacatctaggttctttccagcctctggatattataaataaggctgctatgaacatagtggagcatgtgtccttcttacaaattggaacatcttctgggtatatgcccaggagtggtatagctgggtccttaggtggtactaatgtccatttttctgaggaaccactaaactgattttcagagtggttgtaccagcttacaatcccaccagcaatggaggagtgttcctctttctccacatcctcaccagtatctgctgtcacctgagtttttgattttagccattctgactggtgtgaggtggaatctcagggttggtttgatttgcatttctctgatgactaagaatgtggagcatttctgtaagtgattctgggccattcgatgttacacagttgaaaattctttgtttagctttgtaccccattttttgatagggtaatttgtttctctggagtctaacttcttgagttctttgtatatattgtatactagccctctattggatgtaggattgataatgatcatttcccaatctgttggttgcctttttgtcgtattgacaatgtcttttaccttacagaagctttgcaattttatgaggtcccatttgtctattgttgatcttagagtataagccattgttgttctgttcaggaatttttctcctgtgcccatgtgttcgaggctcttccccactttctcctctataagtttcagcatatctggttttatgtggaggtccttgatccacttggatttgagctttgtacaaaaactccaaaaaaccaagatacaattcacagaccacatgaagctcaataagaagaaagaccaaagtttaggggcttcagtccttcttagcaggagaagaaaatactcacaggagcaaatatggagataaaatgttgagcagagactgaaggaaaggccattcagagactgtcccacctggggattcatcccacatagagttaccaaacccaggcactattgtggatgccaagaaatgcatgctgaaaggagcctgatatggctgtctcctgagaggccctgccagagccttacaaatacagaagcgtatgttcacaaccaaccagtggactgagcacaggttctccaatagaggagttagagaaaggactgaaggagttgaaggggtttgtaaccccataggaagaacaacaatatcaaccaaccagaccccccagaactcccagggactaagccatcaacaaaggagtacacgtggctccagctgcatatgtagcagaggacgacggccttgttgggcatcaatgggaggtgaggtcctcctcggtcctatgaaggctcgatagatgccccagtgtaggtgaatcaaggacagggaggtgggagtgggtgggtggatggaggaacaccctcatagaagcaggagggagtatgtgatagggtatttctggtagggagggaaaccaggaaaagggataacatttgaaatgtaaataaagaaaatatccaattaaaaaaaaagatgggaagctaagggaagaaccttaaattatagtgttttatatttgttttgtattaaaagttacctcttctctttcttctgtgatggtaataggagattgttattggagtataaacaggaagtcagttagggagcttattggatggacactactgtaggtgggaagcatccaggcaagaataacaagtagggttaggctggtagcagtgttgttgaagagaatttgcaagaactacaaatcagtaatggattggattgggatagacataagaaatacacaggaactagatggtccatccttttgtcacagctccaaattttgtctctttaactccttccatgggtgttttgttcccatttctaagaaggggcaaagtgtccacactttggtcttcgttgttcttgagtttcatgcgtttagcaaattgtcttatatcttgtgtatcctaagtttctgggctaatatccacttatcagtgagtacatattgtgcgagttcctttgtgattgggttacctcactcaggatgatgccttccaggtccatccatttgcctaggaatttcataaattcattctttttaatagctgagtagtactccattgtgtaaatgtaccacattttctgtatccattcctctgttgaggggcatctgggttctttccagcttctggctattgtaaataaggctgctatgaacatagtggagcatgtgtccttcttactggttgggatatcttctggatatatgcccaggagaggtattgcgggatcccataatcagcttccaaacgctgacaccattgcatacactagcaagattttgctgaaaggacccagatatagctgtctcttgtgagactatgccggggcctagcaaacacagaagtggatgctcacagtcagctattggatgggtcacatggcccccaatggaggagctagagaaagtacccaaggagctaaaaggaactgcaaccctataggtggaacaacaatatgaactaaccagtaccccggagctcttgtctctagctgcatatgtatcaaaagatggcctagtcagccatcactggaaagagaggccctttggacttgcaaactttatatgccccagtacaggggaacaccagggccaaaaagggggagtgggtggttaggggatcagggggctgggtatgggggacttttgggatagcattggaaatgtaaacgaggaaaatacctaattaaaaaaaatgaaaaaaaaaagaaataggtaggaacaactctagtgtaagtttaaaagacattaaaagagaaactatttaagaagttcaaatttcatattggactctttacattttaaattattgatcttcaaatacctaatatcaggtacacagtaatgtgtaccaaggagaaggtgaggacgactgcccctatcctcagttttcagcatccgaggcttgtcagtgagtaagcagacaaactcaaagagtggaggtggctgacgccccacagctcctggtgcaggctgtatgatttgaagtccaggtgctaagcctgtcagaaaaatgggacaaagtatgaggggggctttctaacataccttgagcatcagaatgaatggatgtagatactgtacacaccattccctccccacctaggtgtttacattcaagacagaagcaagaggtctgcctataccaggtccctaaactctttcttcctccctcagcctcccttgtatttccaccatcccttttcccattagctttgaaccttctctgtattccactggcctaatctaaagctcatggtggtgcttgttttcataagccagagtttttgacaatgagctgtgacatttgaccttttcgaaagggctcttatgaaattatctgaggaggtatagatcagtggattctgagaagcataatgctcattacaaagaaaacaaatatatatactcacagattggtgggtgtgtaatggccaacctgggaatagttctcactcacccctttgagcacagcaacacagctccttcctcctcctccttacccccctcccccctcctcctccccctcctcctcctctgcacctcctcaatttttggggagggagccacttgctatgctgcctcagaggagagcaaaatgtgtctcttaaaagaacacagccatttgttctctgtcaggatgcctctttcatactgtaattagagtgctgtggggggtgtgagtgggggagaaagaagaatatgaaatgctcctacttccctgtggcttattcttcctgcaccacagggttttgaacccagtgaaatattgtgactgaaacatacactattatatgcgtacacagagagaggaagcgacatgtgcgcctttgagttcatgccttgatagtatctatgtgccaaactgaggtggcacaggctggtgggtaattacacagagtgagagagctgaattctgctctgtagctcttgtctttcaccgtttcctagctcttgcaacaccccagagcctttatagtcctttcctaaaaggttttgtttgtatggatatttgtttagcttttgcaaggcttgggattgaactcaggacctcatacatgctagctaagcaagcgctacatactgagctgtgctgtgctctgccttgaaaggttttaaagacaaccatgtgagaactgtcacttgtcactgcccatagtacatgctcttccatgatcatccatctaatggaagggaacagagaaatttgtggaacaaacagtgcaacattcaagaatatttgcagtggttgttttgttttcagttttatttgtggcagtagcaacaatgggttttgttcagctgaaaattgttagcatctttctagcacatggcagcagaggagaaggtggtggagaagccaccctggctctgatcaatccacaggaatgatctttgcagcactggacacatcttgtgtaaataacagagcaatggtgctattggttcttctgttctttaatataaatgtgttatgaaatccagctgagttgcatgcagagatgagcccctgatcttcctctactccaaaccctgctttgcccaatgctcttcccactttggtaaatttcacttcttccttcttggccactaaaatcctcagggtggtccttgattaccctctatatcagagaggtcagtgtgtcctcttagccctaccttcagattatatccagaacttgaatatttctcaatagtcacactctgtccaaggccaaggtcaattgaatatgttctagaagcctttgctgattctgtctctaagtcccctccagtctctcctcaacagggcagcccgagacagtcttagcaaacttcaatcaaatcttgtaattactctgctatatcccaagtgatggtgtcctagttgtactgtgaagaatcgattcttctccccctccatctagcctcacactttcttacctcaccacattcatcttccactgattcagtcatctctgtccatattgctttgcttcttgcattccatgcctctgcccagaatgttccctgtgctccaatgctgttgtgtccttgctgccacctcccacctctccctggcatgcctctcccgagatacatctgcatgagtccctcctttgtatacctcttgcccttcccatgtatactcattgaggcctttactggtcatttaaccacaaagtctgtccttccctccagacctactatacattgtctgtcttctgttcccttgagcgtgggtcagtatactccaggctgcatattattctcatctcctctgccattgccttgcatgggaatgtaacctatccgaggataaatatttgcatataaatgattgatgttgagtatcatcatatgtaggttacttttgcttcagtgtgacaaaaacacctgtcagaaaccaattaaatgggagggacagggggattcactttggttcctgttttcagaaggtccggttcatcgcggtatttaatgtccattagaatttgtcagttatatcctttcaggccagaaagcagagaaagggtgatagggttctgctaggtttcttcttttctcttttttaatccatctgtagcctgagcccagggaacagtgccacccacattcaaggtggatctttgttcctcagttaattctctacagaaacagtctcacagacatgcttggtatgtgccatgccatcttctaggctgttctcaatgtgttcaagttgacaatgaagattaaccattacaatcatattctgaaacaatgcccaggatacagcaggcacttggaaattgtgttttggagatgggatggacggataaagaggagaatcttgggaataaattatctctgttatgctatattctcagaaatggcattagtacttacaaaagacagagtaaattctatgtgctagctatcagactggatttcttgttcttgttatttagtccccataatgaccatttaagatggctgcagtgtttattctgagtttacagatgcagaaccagatttaagagatttcttcaggttatctgtggtagagatgggatccaaaccaacgtgtgtccaacgtcagagtctttcatcactgtacttcaatactaccaacatcaacttttagattaaagagcaaaacaggaaacaaatttccactcattcattatccccacttcaggtaaatagcctggccttctttccctgtatctacaaaataaaaagacttcagattagaaggtaaagcaaaaaatgttatcctttctttgagttcctatggcatctgcctctttgaatctccatgattaaaaggctatgagagcgtggagcttggcaagctaaacaaatgcacaggtcagcttccatgtgttgtaaactatgggctgacaagccagtggtcctctctttgctttagcttttctggatatgaaagttgggctagggcagataattttgtaggttgtggctgcaagatatcctgatgtgagagatctgtggtctttcctttattgttgtggatatagagcggaggagcagaggctggagatttcatttcatagaatgccatttattttccataaccaatttgaagaagaatcactgctcttaggaggcccccactaaagtgcctagtttggagtgtggataacactgcgtgtctgagcatttgcatcggaacactcaccctgattatgagagtcaacaatggatgggatcttgaaggccaggttctgttttagccatcttttattgacaacctaagtctccttaaatccttcctggaacaagtcaagggccaagacataaataactgtaatgttactgaactgtgtgaccttcagcaaagtgtttgcctgctctggggctgtgtttgcttctctggaaagtgggaggaaaagttccccaggttcataacattgaacaccgaaaacatagcggtgaacagtcttgccctggatcaccccagtctcctttccaacagaaccacggtgaaagcaagagctcccacacagccgctgacttcgctgatttctgtgtttgcttcagaatacttaagcctgacaatgttttttttcttggtacctaacctaaatccctccttccagaagcaaggatcatagaaggatattggcaaggttcccttgtgggtagcaaagccttctgaaatgatgaactctgaagattgataggaatgtgatcgggtggcatttgtgtgcactgtaaagtccctccccttccccccacctcctcacccctgccacgcatatacttcagagtgctggtggtatgagcatgtgaatctatgccaatgtgtgtgtgatgaagcatgcaagtgtgtacaggagtgtgggtaaacagatctttgagtcatacaggccagtccatcctggcaggctttgtcttcctttctggttgccatgacagcagcaagagcctctgcatcagtaaacaaagctccctggatgcactgaatcaggagcagtgctctggaactaggggataagccaagagctggtagtctttccccagagggttttacaacagttcttcctaaatattttgtcagtagatgagccaagcaactccctttcgtttatgttggggtaggaggtaaggcagcatggcccagagcaaggctttagtgaccctcacttcaggtccctaggattcagcaaacaagatgatacatcctagatttgtgcttgaccaaagctcctcttgtcattacctcatgggctaacaccagctacagagatcaactgagatgtgaattatctgtgacaacagctcctttatagcttgataaattcacaaagtagaaatcaattttcatattaatataagcatgatttggaagtgaaatctgtcttctctccttttatccctccaggcatatatgatacatgcttggggcatccttcctttgtttgagattattcatgtgatatttctactttctactttattttattgtgaaaatatagaattggctgcatataggagttgattttaacaatttatggctcccgtggaaactactggaaaacaaacgcagccacaaatataaatccaataacaaaaatgaaataagccctctaccacagtattcaaaaaccaagtttcttacatccaataactgaaatttaggaactcgaacttagcatacacatgcagagaccaaaatggagagtcagccagatccaactccagctcaccttctttcaggattctgtgtcttgaggggacctgtaagtgatcctcacaggggatcagaatgggaagaggggcaaccccatactatgaatggcaagagtaagaaaaggccaatgaaggccaattcaggtgtgtttgtgattgtcctatctctttacaggtcactgttcctagagaagacttgttctagctttgcttgggaacacagagttttaatgagataatctctcaatggacaagtcctcaccaattagcctagaccagtggttctcaactttcctaatgctgtgacactttaatacagttcctcatgttgtggtgaccctcaaccataaaattatatttgttgctactttataactttgttattttgttactggcatgaatcataatgtaaatatctgatatgtgactcccgtgaacgagttgtttgatccccaaagggttcacgacccataggttgagaaccactggtctagactgactggctagtaacccccaagaatcattctttttactgggattagaagtatgagccattgcacccagctattctgtttgtttggctttggtattattgttgttgttgttgttgttgttgttgttggtggtggtggtggtggtggtggtggtggtggtgatggtagttctgtagtttggattcaggtcctcttgcttgcaagtcgacactaagtccccagccctttgggtttccttctaatgtcagctctgactgatgaggaaacagagaagttccctccctgttcattagcagcagatgccgcctggatgctttgctctgagaatagagctggtggtgcttctgctgcctcacatgctcatttatttttgttctggtttggaattccaaagactagacacaacacatgggcactccattacaccacggatgtagaaatagaggatggaactgattatatacattcgcatcttaaacccagacatatgtcaggccatctttctactatatgccagaactctccctttaaagttcagatgttttatctatagaaactggacatcgtgagatattaaaagggccactctttgaggttaccaaattcctcaggaaatttagtgacaggatctggtctctacataaggtcaaggccatgtgttctgactttgtaacagcattatttgtgtaatcccttgaattcttatacagaggaaacaatacttagattcttatgggaaaagaccacagaaagaacatgctgccctttctcaggcctagccacctaaatgcttagggtctgatggacatgtacgatctaaggatcgaatggctacttatttctggcaaatagtggagataatattatttacccctttcccttgtaaattcaatatgaatacatggtaacaatggcctgaacacaggatggcaaatataacagcagtctgactagtgctgtgaattattttctgggtcttttattaatccaacataggaattaattaacctctattctgttgtctcaaatgaaaagctcactaaaaacaaaacaaactaacgaaactgttctcatatttctacatttctcaaatttgagctaaaacaaaaatccagtctgtagattttaatcattgacttctcacagcaagggaagagggggagacagcttaggcactgtgggaactgtaactaacctgaaatggaaggtgctactttgaattccaactctttctctttgtgatcttgggcaaatagcctttctacacctttcagggttttgtttaccagggttgtttgtttgttttacaaatataacacccagaaatgatttttaaacaaaaaatataagtgtattatatgaacattaactgcaatattttatttttatactttatggaatctaattaaagagatgtgttaaaattctcagcttctgttcatatgtgatgccatgaaggctttgcctggccttatggagtctacagactagcaggcatgcaaatgtgaataaataacttttggcacaaaagtttgttctcttttctaaaagtatttttatgcagatatttcgaaatgtagttctgcttcaataattacgagtttttaactgttttcctctgtgcacacatgtcacctgttcttgcacccatgcatgtatgtgagcgctggtgcacatgtaagtcatgaagaagtcagaggacaacgtcagtgtctgtcttagagagaagaggacagcaaagaagaaggtggggagagtcaggaaatacacagttgccaatgggcaaacagaacagagttaaagccacttgataactgaactgccttccctttcctcagtgctgcagcagccagtgagggtggtgatgggtgtgcatctttaaaaaacaaataaacaaataaacaagcaagcaagcaagcaagcaagaaaaggcttggttctatttgtgtggctctgggccagtaagatccatccaggaaactaggtagaagggaaccagacctaaactgcagagaaaagggaagccagccagaaaaacaaaggacccagaaactttcaaaacatagagaggccagacagggacttgctggctaagcctgcccctaatcaaaccgcaccatgataatagaggcaaaaagaaggtgacacgggatgtgctatatatatattaattctacagaaattgtagttaaaaaaacaaaaaaaacaaaaaacctggcatccatgttctaggattccagcaatgcccctggctccctcgagctggtacagtgatgaaggttctgccttactgaaacttttatgacccacggcagaggagtcacctgcttactgatgagcacattcgatgctttgcattgttgaacatatcctgtgagtgaggcttcttctaatatgggaggatgaataaaatggataacatcttaacaaaatcttcctcttgttgggcatgtggtcacatgcctgtgtttcctacacttgaggggcagaaaagggtgggtcaggaattcaaggctagccttcgctatattagtgagttcaaagccagcccgggccatagtaagtgggttcaacacagaatagaatagaaaggaggtgggattttgaatatcccacctaatcaaaccacaccatgagttatggtttgaattatggttcctttctgtgcttctctagtcttggatccttgccatttcaaggagccacttgacacacttcagaattagttttctgagtcagatactggaaacacttgtactgcttaccctagatgctcagggatttccccattcctctggttagatcctactgagattctcctttgtagtaaaatattaaaaaaaaaaaaactacctcaggttgaatttttcccaggccagctcccagagctagttggaagtttaagacatgagcatatatgatgttatgaaatggaaggagatgctgatgggttattcgcaattaagcagcataaccactgaatacctggggctctgtgtgcagccaggcctgagttgttctaacctctccatgtcatacttagaacataacttttaaattttaagctaagaatcaaagaaccaatggtaagaacattggtgtttattgatgccatgaaatacccaggccactgttacttcttaatggatgaaatccagaaaagaagactacaagaagcatcccataccatgagttccactacccagaccctcagcatctctggccactctccactttcacctttgccttctcttcctccacagtaccatcaggaacttactgcatcttcagtcaagcgcatgccttgtcctcgcatcctcaacttgatcacaaccattgcgagtgggtcctatgcccaaggaaaccagttcagtgtagacaggaaagctaagcaaagcagccatctttcggtatcatgttagaccagtgtccctgctccctctgctgcaacaaggttacannnnnnnnnnnnnnnnnnnnnngttctttatttatgagtattaccttgagtacagcttccaactgtactcctgtgagactatcgtagcaaagggtagctggcctggaagggtagttgtagaatgcagtttatgctaccctgttttaagctctgagtggaccatgctactagccccactcaggtttctcagatctgcagatgaatagcacgtgcgcgcgcacgcgcgcgcacacacacacacacacacacacacacacacacacacactagcttactgctcaatggtcgggctcttctaagccttctttggccatcatacccttcttttcactcccagatcagcaccctaaatctgccctcagcttcagttgctcaattacctttaatcccagctcaacaccataaatctgccttcagcttagttatgtttctttttaaaaattagatattttctttatttacatttcaaaagttatcccctttcctcccttttcctccaaaaaccctctatcccatcctccctccccctgctcaccagccccccttccctctcctgattcctggccctggtattcccctataatggggcatcaagccttcaaaggaccaagggtctctcctcccattgatgtctgataaggccatcctctgctacatatgtggctggagccatggatccctccatatgtactctttggttggtggcttagtccctgagaactctgggagtactggttggttcatattgttgttcctactatgaggctgcaaaccccttcagttccttggatcctttctctagctcttccactggggaccctgtgctcagtccagttggctgagagcattcacctctgtatttgtcgagcaccggcaaagcctctcaggagatagctatatcaggctcctgtcagcacctcccacctgctatgccaggcccagtcagggaagtggccaatggccaccctatcctagatctcacctaactggtggctttttctccctccaaagcatggcgaatctctcctgttttgagtctgctagtcttccttcagggaaaactggaattcccacctattccatccagctcattggctgttagcatctttattgatcaatcaagaaccaactgtggaacaagaccttcagtgttcacatgcagattccctatcaaaacatcagaaccactcctttacaggtagtgactaggaaaggattggtagtgatagtttctggggaaactcaatagcaggtgattggttattccccatctgataacccattggatatgctcttcttctcttttttacttaccaaggaactctagtatcatttttctacctctctttcctcttttcctccatctctttcttctcttcatgctccttctgctctggagcataagaccgtgtggggttttgtgtatacatgcatatggaagtcagagataaagagataaaccttgcttatcaggactcaggggccatctactaaattgcttgaggcaggacatttatcttgagttagaccagttgaccagtgaggcctaaggatccacctgtccctgtattttccccagtgctggcgttacaagtgcatgtcaccatgcctggctttttaacatgagttcttgggttggtcaagctaagggcctcatgcttgtgtgtcaagtattttgctaactgaactgtctcccaaactccaagatttaatctcttatgccatagaacagctttgttcttctacctgtctctgggctcttccttcctcttgaccttcacttcaactttccgtcaggcctagtgccctctgcctcattcaccttcccatgagctaggtcctagcccatctttcttcctttcttatttaatggacatcagacacaggctgccctttagtccttaacagtatgagggttactgactttcagcaccatgccctactgaacaccacaatatactggacactgcgccagcccagttgcaaattacttctctaagtcttaattgcctcctctgtccaatggggatgttaacagtattttatgagagctttgtgaggattagatgggtttgtgggcttgaaaaccctcatttaagactggcacacacttattggtgaatgtaactcaatcacttatggaaaacataagagcagtggctttgagagggttaaggattccattgtggctgaagacatagaaactaccacatggctggaaaagatcttttcagtctggagaacagggcaaggatggggaggcctcctgcctgtggttgaataaagcttacttctgtagaacactagagggagatcatcttgcagaaagtagaaatgaagtgaacaggggcgtctactcactcttgctctactctttctcttcatcatcgtggtgttatgaaaattcaagggactgtccttgttgtccacagggaatttgccaaagaaagagagagagtggagaaccgaagagcgttcatgaagctccggcgccagcaacagattgagcgagaattgaacggctaccgtgcctggatagacaaagcaggtgaggtttaggatgagtggatggatgggtaactgtgcatgcgtagtcaactaaccctgcctagtgtcttttaagactcccttcctactggcaacctagactagagcagagagtaacagtgagcgctctgtgagtgtttaggctcctcttctgtttcaagagtctaactctccccccttttaactaatcaccttccacaaaaaggaaggattgtcaaactgagttcaggaaaagaatacaaaaaccagtgctgagggaaaaaaaggacagcctggtaatattttatatttgtgtcaccctgtgactgataatccatgcattcagtaaatctagattgagtgcctactttgtgccagggactcagagtagagggttgagccaaacagaccagcatgactccaaagtttatgtctcctagaactgattcttctccagttgggaaagaagcaataaacagaataattaataactcacaagaaagtggtatgtgcagtgggaaaacagatcaagcaaggtgaggctgtgctacagctttcacaataaataaataaataaataaataaataaataaataaataaataaataaataaatacaaacaaacaaacttggagaaggtaagggattgaccatggaaagatctggagaggagaatcacagggcccaatcagatttaagggaatggccactgctgccccagcagcaaaggagacaagaccatggtaaaagtggagggggcagcgggaaggcagtcatagaccagtcacagcagttacacgtgtgacctataggtcactggactttctagtaagcagaggtgacctgctttgagattttaaaggaacatatgtttgctgtacttgaattagaccctagagaccaaggccagaggcagcgaagagatggccacttagctgtccaggcaggagacaggaagaaggaaaagcattcaccggcacctgagttatcatcactgctcacttatgggaagaatttggacccagctctagggatgggtccagacctgccacaaaggcattaatacagagccaccagatccaaggtggctcaggtgcttatgagaagcatcagtcaccaactgtctgacaataactgaagcatttgctttccttattattttaaagattggattgcattggtgttatatatcttcgttttcctccagagcaaagagtaattttttaatataataataatataaaaaattcacctggcagtcagcatcttactctattcctagtagaaagccaaccacaaatgggaagtcacaaggggacaatagggaccttgatttgatgcttcattctgcaagtcggattcttccatgagaacttgcaatgacgcagttacacttcgtgggctgccaacactccaaagccctctttaagctcaggagtcaactcttgattatctacaagggcggagaggggatatgtatgtataagagccagacatatactccctgttttgaatatccacatttctttgtcatccctgaaggcaggaactaggcattttgattgtgtgtgcatttcacccctttcttctccagcctactgagtaagggtgagggggatataaatgttgcctccctcttcccagaatggtaagtctgccttaccttgggaaggcaagcagatttgccttcaggccaggcaggcagcttgaagtttccaactgtccttggtgtcctcagtagtggagccatctgacaaactgctgaatgaactggcagaaaacccaggaaagacttctccgaagcctgaccatgatcctacccagggtcaggtgccatggagtgtggctcctcttgcagtatgctttctcagtccttgcaaaactccaacctttccctcttttccagttagcaaaggcagccctcgtcccccccccctaagaaaaagaagcactgcaacatcaaaccgtgcttcctggccctcccctttacaagtggagcgtgagcaagtcagacatatgggtaacatttccctggaaagacactcaagttcgaaagcgaacttggcaaaaggcattggtgggggaagggtggttttagcacatctagagcccttgaagtgcttctcagaaatcctcagcagccctgcacatcttcagcctttcctgggagccctcctatctgcccatttcaaagtcaggcactgtgcaaagcaaatgcaacgtctggctaaggtaattatgttttctggaatatagtttatcagggatttgattttatagtgataccctccaaatgttttataaagtgccttaaataccttatatgtctgcaagaaggagcaccctacctgtaacacttcacctgtcaatgtggaatttcaccagaggctgtacttgaagtcctaagctaaacattatgatgtattataatggctacccttcatagtaatgtccaaacctcaaaatgttccctgggaaatgaattctatatgctctcaattttatattaaggtagaatgacagcaatagctttatccttttctacttgctgttaattgctatgagtgcatacatcaaaccattgtttgataagacctgctgcaagcttttccccaacagcctgtatctttggaaatgactgtcaaagcacttatgggctaaagcagggtagagatcaaaattcaacaccatcattcttagaagggtaccttggaaaccagcagatatgggacagaaaggctgttttgttggtccttttgaaggggatggtaatgagttctactcatataaggctctccattagttgatacctcattgatgactctgctcctgaagagaagaagcctaggaaaagaagcccttaagaacttgtgatatctttttatataccaacgaaggattgaatgccctaacaccaatgggcccttcaatttgctggcacccactgtgcattcaagaatggattctgacattaaacatcccctgaaggtagcacatactctataggttaaagccttattctcaggctatctctatttcagaagccagaaagtgggatccaagatgggccttaattctgtctggtcaaatgtacattttagaaagctttacaatccctgcctctcatcagttcattgactttttttttaaaaagaataactttttttttaaagaataaagaataaccttggggaaaggatactgcttaatataaaatacaacttagaaacagtatagatcatggatgtacaggataaagtctaagatgaggctcatgagcctctaagcacacagaggtgttcacagacctggaaactctcaaagtacattcttttggaagtctgtggagatttccatacataggaatgttggattaaattgttagtcattggtaatagaccagtggccccagggtcccctctcttcctcaaaggtaggaatggataaacaaattctacctcttgatcacgtggctgagtttttcctggctaccagctcctgtccttaagttatcctgggctctttcctgccatgaatcatctcattagcatacaaaagacagctctgagccaggaaccagagacaacacacacacacacacacacacacacacacactcatatacacacacatatacacacacatacatatatacacacatatacacacacacatatacacacacacatatacacacacacatacacacacacatatacacacacacacatacacacacacatatacacacatatacacccacacacatatacacacatatatacacacatatacacacacacacatacacacacacacacacgcacacatacacacacacacatatacacacacacatacacacacacacacacacacacacacacacacacacacagattcaagaatgtactcacacactcacgcctccttagcttaagtacagctcaacaaaagctagatagaattggtggggagatacagacacatacctgcctttttatctgaagacccttgggctcttcccctcccccgccttagagccatgaagatgcataagccaaaatatagcctcatttcctggatgaggggacaaatgctgtagcctgagagacaggaagaaggtactttctgagggcttggtagagaaagaaacttaggtagaagtttaaaaccttttcacttacatcaacgtaggagattttaacaaaaaatactacttcttcctgcccgccatggggcatcagttatagaactctccactttgtcagcatcccccatgaacccctcactactcgccctcttgttctgagaagcccgcattccagtgaggctcgatttctctccatgctggtgcccacaatgagctctgaactcctgtcttaacactctctatgtctccttaagccagagctgtccctgagggatttttgttttgcgaaataatttggcatttacagatgatttaccaaaccattcgtttccatacagaggaagtcatgcttgctgaagaaaataaaaactcgggaacatcagccttggaaggtaaggaagagctgcgagacgtgctttgttagtatttgccctctaaggcggtggcaatctctcttgatcaaagaggagaaagaaagaagaggggggccgcactgggatttgaaacatttggagtctctctgtaataaaatccctcatgctttaaaatgatgagaattgagtcacgaatttaaatgccttttaaagtgatggaaatgaaacccaagagctgcattgttccagggtgtgtgatggatagagctcaatgaaaagactgtcatacaactgatggtctatgaagggatctgctattaaaatctatggggatcatcttgggaccacttttgttaccgggaaatgccattgtttaggaagagccaggacaaatagatagggagggcctatttacctactgcggttagaggtagataaactccaactgggattcaaaacctatgagcatctgcaggtgccggcaagcacagcgctgcctgccattctgtaaactccagattcccatcacccgggctccagtattaaaggccaacaactgtgtcacagggcccttgcacaaggcctcttgcccaaagccctcaaagttttgtccaggatgatctgggtgtacttatggcctctcactggccttccccttccctggcgtagtgcttcgaagggcaaccatcaaaaggagccggacggaggccatgacccgagactccagcgatgagcactgcgttgatatctcttcagtgggtgagtgatccagttagatcttcttttcctactctggatctcccatgaaaatgaagatcctgtcttttgagaagaactacatggagaaagaacctaaaggatccagaatctagggacagaattaagggaaggcatgggaatctaacctagatgacaatgatttacagaacagatgaaaggaccaggggatgctgtgtacatgaaacttggggtatagggttcttcaagtgtgacagatggatcttatttgcagatatatcctctctctcctgggtgtgacagtgacccacgttgggatacaggttgagtatccctaatctaaaaatccaaaatctgaactgttccagaattagactttaaaacaaaaacaacaaacaataaacaaacaaacaaacaaacaagcaagcaaacaaaaacaacaactatgctgtggtaccgcaagtggaaaattccacaccatgaaactttggtttctcccacagttatttaaaatattatatgaggttaccttcagcctaggcatataagatgtatccgaaatatatgtgaattttatttgtagacatgggtcccacctccaagatactttatcatgtgtagctgctagtgcagtcgctaaactaatagtctgaaatctgaactgcttctggtccatatattttggataagggatactcaactcatatatttctaggatcctgaggacctatttcttctagtgacccacatgggaggagttgaagccatttgctttaccatagtagcaccaacctacttccatcctgtgaaatttaaactaattccttttgacaccccactgatatgactacagttcaatcctaggttctcttacagattctggccgatggcaggttttttcctccccagaaaaaaaaaagaggcaggatctcactccatcctaaaaagcagaagagacttacagagcccattgctgctttatgttgccagtggcagcaatatcacaagtgcagcagaaggattccggtgtctgaagcatatctgaagggaaagggcagagagaagcctgtctgttgcagatataaagacgatcctgttaggagtcaagatgctgggtgtctgcctggtgtcccgcttgggaatctttcagtttcctaggacttgagtgcctggagaggaaaatcagggtttcttcctgtggagattaattagcccataacatagggattgcccaggtctgcaatgtggcggtcaccttgccctggtactcaagcttgccctttggatgccacctgatcgtggagggtaagcctggcgtatttttgtcatctcattcctcctcatttcccttccttaggcacacctcttgccagagccagtatcaagagcacaaaagtagatggggcctcctatttccggcacaaggaacggcttctgcgcatctctatccgccacatggtcaagtcccaagtcttttactggatcgtcctgagtgttgtggctcttaatactgcctgtgtggccattgttcatcacaaccagccacagtggctcactcacctcctctgtaagtaaacaacaactgctatccccccaagtgggtggcttggtttttttttttgtaggggtgactataagggcctaaagcatgctaacagttcacactgaaggaagctaaagccgccacaagggaggataggttctcaaataactgcttagagccttcatgatcagtggggtgtaaataatcgctgctgacatttaacaacaccacaacaatggtaacaatgagttagagttgtaccttaggtcctagaaatttcttatgaggctttcttatggttgaatcactgagacctggggagatcatctggagaacaataaatacgtcaaatggactttaaaaaggaacatataagtctgctctgaatgtgacggcttctgggtatgagtgatggccagcagactgttacatacagttgtatagaggaggatgttcagcttcttcagctaatccacagtagagacctttcttctctaagggctgtcctctgcttgaaggccattgataaccctgctcctgtcactaaagggcaactgttggttgggctgtgggtgggtgggaggggtgtcatcccagcttgcagtgttcagaaattaggctttacccaatgctgccttcttacattctgaaatctggggctcctctataaggggtctgtgttagttggagagcagaggaactaataccacctgtggaacaaacgattctactttcgctactttcagactatgcagagtttttgtttctgggactcttcctgttggagatgtccctgaagatgtatggcatggggccacgcctctattttcactcatccttcaactgctttgattttggggtaagtcctcagaagcctgcctgtccttctgtttctcggtgataggccccgggtttagataagcagcttggtctgtcactcagcatgagccactgaagtcttaagttgtaaagggagcatggatatggtgaagaaaaggcagttcagaagccagcgaatccttgcctggcagggatttgttcatttttttaaaaacctctttgggttttagtgtttgtattgatgtataacacatacactaaagtgtgtacatttaactatatagcgcaatgagattttacaaagctactcatagccagaattttgaactacttattatcttgggtgaagtctgggagagaaggacaaaggacttaattccagaggtggctttagaagaaagaggttatacatttgtttattttctacttcagttgaaaatgagcataattgtctccatatgccctcatatgcactcacccgctcttgtattagcacaacgccatgcagaacatttccatctagctgtgtactttctatataatatttaggtatgtgtgtattgctagggatgttcagggtgctttcacacacattggcttcctgtgctgcttcccagggtcccgaacaagacatggggtgttaggagttagcctgccgtctactcataaagtgacagagacggtagtgctcagctaacatacctggttcacgtcagaacagagtagcaggaccagaggtttctgagccacttctctttctgccaaacccatttccttttctgccaaagctccagtcaggtgatgaagattctgagtacttgccaatctccattttcaccaagaacagacagttctgagcacaggcacttttcagacataatagctagtaagagaccattttaaccttgatttttctcacatacatattttttcagctttgttttgaggattcatcttcattatatctccccagtccaatgcctatgatatagtcaacattccataagtgtatgatcacagaataactcagagcctgccttagtggcatgctcctctaatcccaattctcaggatgctgaagccacaggaccacaagtttgaggctagcactggctgtgcagtaaattacaacctggtctaaacgatatagtgaacccctgtttcagaaaacaaaagttgagagggggctggagaggtgacttagtggttagggctacttgttatcctgtcaaagagctccagatgggcatctaacactcgtcaggaggcttccagccacctataactctagtttaaggggattctacagttcggtactctgggccactgcactcacatgtatacctacccataattaaagtaatcaaaataactccaaaactgctacattaaagatgtacagtgttaatagaccacttgcctaccatgtgcaaagaaggtcttggattctgttctaattcccatgaacaataataatcttgaaatgttaattgcaattatgatttcctatagcaatcagaccgtatgtcaacaaagacactataacatcaagaattacaaggcttcagttcctgaaagatacttaacacaacagcagctaaatgttctgagcagtgctgcagtctggaacaatgagagaatgtggactctttctgagttttccatattggaacacaacctagaataactcaaattggttcccatgaattgggtaccaaccactcctttgtgtatccaaggtgatatgatgcaagatgcattgctattaagtttgtgcaaaagcagtggctaggccttgtaatttcactaaggccaagtcagtaaatcaatgaccagtgagcagatttaaagttaggaaggacagggggaaaatagggaatgtgtagccatttttctttggcagcttctcatgtttatagctcaatcggagttagggctgcctggggacggagagtcttaaatttaccagcgcctaatgagagttgatgactatgtactaagtgccacaatgcttttctccctcttcttactgtggctgggtttgtctcttaggtcacagtgggcagcatctttgaggttgtctgggcaatcttcagacctggcacatcttttggaatcagtgtcttacgagctctccggctcctaaggatatttaaaataaccaagtaagtggtgccatctggcctcttcctgtcacctttgaggacagaactcttattgccttctccccttgctttcccactctctgttccatttcttacattctttacatctcccttccctaaagaccaagctagaaaactgtcaatgacaacacacagagtgccacatttcccaggggatgatcatgccacaagcaccttgctttcacagatataccaaggcagttgttctcagacttgtaggcagatggcaagctggtcttgggaaagacatggttctgtgccatacctgtgatcttgtctgggttcacaggtattgggcatccctccggaatctggttgtctccttgatgagctccatgaagtctatcatcagcttactcttccttctcttcctcttcatcgttgtctttgctctcctgggaatgcagctctttggaggcaggtaagggccaggggcttctccacctgaaagaagcactcattagtctcaggactggaagcaccaaggtgtttggtttggtgtactaccatcttgtttgctcttggtctgaagagtctgtagatatgcttgagaagcaaatgtctctgctgttaatacatatgctgaaagtggttcttgcaggagggcctatccccttgaagctctctgtgaaatgatcagtgtggaatttcataactgctgaccagtccaaactctgaattttcacttgtacctttcaaagctcatgattttttttccagacacaggggctaccctcttcatagaccatatttggaatggacagcagtagggggagtggcaatggggagaagagagaaatgatgaaaactgcaatcttgagtctggggaatttggaaagtgacatttgattctccctgaatttccttttcaggtttaactttaatgatgggactccttcagctaattttgacaccttccctgcagctatcatgacagtgttccaggtatgaggccaactgatagctcagaagcactatgtggggcccatagaccaagcagtgtaagaagacaatgtcttgagtgttagagctcccattgtattccctattagaccttggagtgttcctcttatttgaggaatcgttacaacaatctctcaaactcctgtgcctcagttatcatcagcaaatggctttatctcaatcacttagtcactcttctccccatacctgtgcgtttataagatatctggaacatgcagtcagaaatcacatttgtggtttgtccaaaatctgaaatctttacatttcccagcctatgttcaggttaatgaggtaatgggttatctttccactgccatctcaaaatagtaaaaacaatttttaaaaagtttttttttttaagtcagagagaaaactcaatctcaacagtattttagaatctttcagatgaaaaggagtatagcctagacagaatatgtggctgaattagaacccagttttcaacctagaaccactgaggctttccccaataacgctgttgccttgggaatgctgtcacccctgagaacaatcaggtggtggtcaaactctcatatcagtgtgagtcccacaagacatggccagcccagagggcagagggactcagaaatgtgaggacttggagtatctcttcttttcctcttttcatattgaatgactataattcttttccatataaaaacaggattgtttgcttatgggaatagctttctccttcaccttagcaggaaatcaaacaggaagatagatagataagatccagccctgatatttgcccttcacagtggacccatttttttctgacaactttgagtcttgacctgcctattgtttctccaatgtagatcctgacaggggaagactggaatgaggtgatgtacaatggcattcgctcccagggtggggtcagctcaggcatgtggtctgccatctacttcattgtgctcaccttgtttggaaactgtatccttctaagttgttcttctgaattctgaccacttccctgcaccagcctttgaggaggaggaggaggtgtttaatggtgggtggtgggtggtggatggtgggtggtggtggtggtagtggttatggtggtggcagtaatagggcttgtataagcaaggtgagaggccataggcaatactttagcagactaaagaagacaaaattttcatcttaaggaatttgtacagaatttgtaattctgtaaagaatgcaagcattaaaagatacaactgcataaatctacagaatatacaaataataagctttgttgagtggttggagatagtacaaggtctatacaatatgtgagacctgaaatctttgtttactgaaatagtgggaagattatcacactagttagttaactatgtatctatatacagcagagcctaccatgtcataaaacttcaaaataaatagtacaaaagtgctaataccattaagtatcagctattgtgttgattttatgtgtgaaatcatttttgctgtatagatactgctttgcctattccttaccttgtaagagaaaagaaaataccagatgacaccaagtcaatacaatggtagaggaagactagcagtgaaattctttaactccaaatcttaaccctaatgctctgggttctactttgttgctgaggagggaaaaataccctgagaaaagcaacatagaggaggaaagaggctgcttcagttcactgttccaagctatggtccatcagtttgagaaagccaagggaacagaaacttgaagcagcaaatcacagctcatagtcaggtgcagagaggagagagttaaagcttgttttgagctcctactgtattcacttctctgctgtggtggctggaacctggcattggaagctaaaataaaccccacttttgtcagggtatttgcttataggatcaggaacaagactaagacactagtcaaaaaaaaagtctggaccaagaagattgaggtttgagtccttgggatattcttcatcagctgtggtcttcaaaaacttccttgttccttctgagattttatttttcacatctcaaaagaagataatgatctcttttactaactaaaaacattgaatgaagtaattattaaatgcattttttggagacagggtctcattacatagctctgtctgttctgaaacccactatgtagaccagtctggtctccaaatcacagagatctacctgcctctgcctgggattaaaggtgggtaccactatgtctggcttaaatgcatcttgtaaactgtgaatatttgtgtaagcattaggtatccagaagagtgaaactcaccttgaattgggctgtgtaacacagaggcggcacgctggggtggctgcgtttttgcatctaacctcacaaaggaaggatgctcttttcagcttttcccatgagggcttctagtagtaggaacagattataaactagacatgaagaatgcattaaaagaagctatctgatacactgaagaaaaggaggaccagtttgccacagtggcagccccttgattttcctgctactctgtaagtcaccagaaccatccagaaccagtctttatgcaaggaccagtttcatgttccacaacataggaacctcgaacaaagaggatttagagttcagacgttagagcatataggaggagtagatttcagcatgaaacttgtccatactgtgacatttgccaaataaatcctggaagctctctgggaccctaaccagaagaacgagagacctaagtcagtaccccaatatagaaacaactggtcctgtttcctaccatttttggggaaagagtggcttggtgtccactgtgtccactggtctaagtagatttccagccttccaggagggaaagatgaacactgttactcagctccctgcacatttcactcaatgatcctcttggtgtttattgctagtcatcaaggccatggctgtctgggtgctccctcaccctacttcccctcataagttgtttgattcagggataatttttttttattctatgcaaagaggaaaaatgaggaaggagggtggacacatattactgcatttcctctcttatggccttagcaacgtcttccagtgtagagtcaggaaagctctggaggtaccctcccagacttgctgaagccttttacttttcttgcctgcccaatccttaacccatacccacagacacgctgctaaatgtattcttggccatcgctgtggacaatctggccaatgcccaggaactgaccaaggtaagcactattttccaagaaggtcatcttctggacgcttttaaatggctggacagccacgaacccatgcacaaggactagtttgcctttactgagttggttgagctttgattcagtaagggtccctcatgggatatagaaaatatcaacttctctccattcgtcctcagaaggttccttcctagaattatggaatgcagagccaagaaaactattagaattctaggttttaaactctgcctttgctcctgccactgtgataatattatggcctcagctttgtgaccaaatcctcaacaggttaggcgtgagagtggtcaggggaagtgggactcctacattattgctgctggggtaatccattggccatggtcattgtagaaaagtttttattaaatcagatactacctttctcaaaaagatattgctttcttttaagggattctccgttcccagggatgagaccatattgattgcagtagggtggtcgacaaaatgggtataataatcttgccacacaggtttgattttaggaaggcacagaacacctcgaggttttctgaatgttttccactggatcagtgatgtgttgcccgtccttccccagttctcttaaaatcctcatctctatgatatgagaaggcaaataccagctttagtatatgagaaactggccttgagtcctatatctgtcagtcactggctgtgttagctttggtgaaagtgctgatctccattaataccagttttctctggtgtacaaagggaaagacagatatgtgtccctatatgtctcatagtattgcagcaaaagtcaaatgaaatactgtgtgtggaaaccacagcctgctgggaagacctgcgtactataatacttctaatcaccacctggaaagttttccttgctgttttcacttcaaacaagaatatagctgaggtagggctggggaggtgcctcagaagttaagagtgtccagtgttcttccagagggcccaacattggttgtaaggaccatatggagtgtctcacaactgcttgtaactccagtttcagggaaatccaatgcccttttctggttcccatgggaacctatatacatctctgtctttctgtctctgtctctctctgtccttgtccctatccatgtctgtctgactctttgtctctgtctctcactctccctttgaacaactaaaaatgtggatgaagaaatgagacctctgcctaggaactcataaacaatgcagggaagactccgtgacagggttaaacattttcttctgcttacctcatcttgcttggtcttcagagctcctggcatggaatcaaaggaagctgctctctctatggcaattctaggtaaagctatctctgttttgtgtctaggatgagcaggaggaagaagaagccttcaaccagaaacatgcactgcagaaggccaaggaggtcagcccgatgtctgctcccaacatgccttccattgagtgagtaggctatagaaattgaccctgggcttctgggctaaatctagtttatcagtgtctatgatagtcagtcttaggaagggacctacctcttctgttctatgaactggtcacagtgcatagtgcagtcttacaggggaggtaacaagaatagtgggtgggggagggcactattcacaaaaatccaagagggactctatgcataatagaagcctaaacttgcaggagaaagttcaagttcatgttctgaaggaactgttcctcagcaaggtctactgtgtcttatagaacctgaggggaatagaagatagtaaggccattgagagtggcacagccagggcagccggtacggaagtcatggtaacacttaacatggaaggacatagctatatgttaatacggtttccactttaaaatatcactccactccacggaaaatgggttgtgaaggtccagtatggccacagtgagacacagctagctgttaaagtggtgtgggtgattatgagttagacacagaaggtagcaacagaggagaccataatattgctcactctgccttttgaaatgtgagtcaatgggatacatttaggtattgaatgtagtagggggcaataaaaatttctcaccggttttatagtttggggacttaaatggctgcatgaagggtgggaccatttattgatccttcagagactgtggaaattcagagtttgttttggtcacattgactgtgaaatgcttccaaggcatccaagtgtgtgaataggctattggctgcatgagtctggagcattgaggagaagttgggattaaaataaagatttgggggaagtcatttgcatttagatggtatttaagccagcagtgtgggtgagatgacccaggaagagtggggacagggaatgagtggagctgaggacagaggctgtgagcatgcgcttctctgccagaggagaagctggggaaagaggcaaggggatgtagccaggggacagagaagggaccactggatttaacaagacagagctgttttagtggccgtgctagtagcctgataggaacagtgtccaaatggaacagatttgagagtgagttggaggttgatatgaaggagacacaggatcactctgccagaatctgtcttgatcagtgctgcatgggagaacttggggagtcagtatgggcccagcacaggcctggcctctgcacaataagtgggggcagttggtggacaagaagcacagaatttcttcctgatgataaacaaggcatgcataaggctgtgtaaggaatccctgtgtgagagatcctgtcatgtgggtggggacagtggtaatccatggagagagagaaaaatacagtctgagctagtggcccctgtcaactgttacttaaagctagagagaaagaagtccctggtgcattggtctttggaagggaggaacttctgagtagtctctgccttacccactgggatgctccccatttttatgtggtgtctcccatatctattttactattgatttgagtttgctttccaaagctgtgaaggcttgcctgctaagccccttttctgtgagcctgagaaataaaaagaaatcattaaagattgattggagaataccaaacaactccttccttttcagactattctctggtctgagtaatttccaccctgctctcctgaactcaaatattttggttaaaatcacatacacacaggtatctaaaagtgcagatggatagaactggctgctccaggagtgggtggttctatttactgagatgaggaagcctgcgggagaagagggtttggagagatgtgattggagatgatgtttagcccagagtaggaactatttatggaatggaagaatgaatgaaatatgggtaggcacagggctgtgggaaccaagcagtgaacaccagtgcagagtgaaggtgacgcagatgctgcaagcatcctcaagaagatgacaccaagaacttgggttgctgtccacatggtaatgtggtgtttattgttgctatgggtaaccacaagggatgcatgccttgctcaggtgtgcagctcattcaactgatttctggtaagcacataaccttggaaagaacattatcacaaacccaagcattccactgttagccttaattctgtcaaaaagatgctccgtggcgttaaagaggacctcttagttccgcagagcctctgtttccccacgtttggaatgagaaggacaactgttctttctgcttcacaaggctattgtgggatatataccagatcacatgcatatgagttgaagttagtggctacttgtctgtgtggtttgagggtatgagcgcaaatttgggatgttacctacatgaatagagaggtaaaaatcaagtgttaagtatgtgtctggctgtatgaaaaagattagtttctcttttgcttgaaatgtgtgtgtgtgtgtgtgtgtgtgtctcagagagagagagagagagagagagagagagagagagagagagagagagagagagagagagagagaatccctctatatacttacacatgctcctcgagggctggtgttttgcatactcaagaatttgcaagtagatcatatgatgtgcctgtcccagtgggtatgcatgctgcctgtctagagtgtatgcttctatttctatatgttaccaatgtttctagccccccaccctgccccgtgcctgctatagtataggctgctgatgctgagagatatggattttgccaaggagctcacaacatctctataatggtgtctttatcaatgagtgcttgtgtgtacacatgtacatttgtacttcttccagatacccccaaagagaacatagactggctgcctctgcttcctcagactggccccttctataaggcttctttccaagtgcatgagttatagcagttgagcagagctcattagcctggcatgttctacactgatgggggtcttctcaaacaaagaacatcatttacctattttccacacccaacagggctcactgggctgaacccgggttctctatctcaaaggctagagcaagttctcagctagattgccctccaccctagctttgaccctgtgctgccacactcatttctactcttgcaacgctcatctatcctgctacttttaccttccctcgagagtgtatttgaatggatgcaatgcatatgtagaagtaatatttctttacaccagtcttagaaaatcaattctgtgttttcccccagaggaatagagcaaaccttaaaggcttcgcccttggggaatcattcacatcctctaaagtgtggctctgtggcctctgaagtgtgaccttgtccttagccttgggttgctctatagcctcactggtgtgcatgacagagcatttgtttcctccgtggtccataaaattgagccgggatctgccatacagtgatgaccttaggagtcaatcttgtgtggatatccttggtcacccttgacatggtggggaaggggtacttgtcaaagcaggactccagagggggcagtatgaactcactgcagcatgctgtgaagcattggaaggtctattttacacgaaatagtctatcctctgggactttgcatgtgtgcttcaagaatgagatctgggtatttgcatatagcaaggactcagaagccaccgtgggagcactcgaggtgggggtgtctacagggggcaaagaggtgcatggaagccccatggacatgcaaaaaagactctggcttccctctggacatctggtggctgtggggcttgtggttcctataggttggggtggactgaacctgttcgtttttcttccccagaagagacagaaggagaagacaccacatgtcgatgtgggagccacgcagcagccacctgtatgtgtgtaccggtctgcgtgtctgggagtggtcctgtgtgtgggcatggggatgatgtggttttgtccttaccatggacaaagtgataccaagtgtaaatgtcagtgtgtgccttggtgtgtgggtgtgtatgcgtgtttcctgcacatctgtgaacgtgccccactctgcacctttcagtgcgcttctatcagtgtctaaagtatgtgacaagtgtgttgtttgctctcgtgtcgggcctgcgagtgggcacgtgttcacattggcaattagtgttggtgggtgttctgttacatctctgtgtgggcctccatgaaggtgtgtgtgggcccatgtgcatatctctttaacagttggtgggtgtgtacccacgggcatgtgagggaaggagtgggtgtctgcccttccagctgaggagcccacgcctgcgttctgtgtgtcatgtttgtgtgttcctgctgccttgtgaatgctcattgggcctctgagctgaaatgctccacagttagttggggcgtcgactgctggtggtctctgaatatagtcttttgtgggtttcattagctgttgctttaggagcccacaatctccctacctttcctgggatgctgccattgttagaatatagtggctgcttgccatggtcagtatctttgttggtctctgaatatggtgcatctcagcccctgatattccaggctaaaatctggatggaaagaggaggagaatttctgaccttgaaggaagggtcatttgtgggtacataagagaccccagctgatacccttaatcaaaggagtactggggagggatggctggtgagtctttttactgctcgctggtcttggggacactaggctcagtcttgggctgacccatccttaccaaatggctattgcactgtagaggcagggactgaagtgaaagataccctatacaggacttggaggtactggtctgacaactttcttctgtgtagccactctgcccctggcatctctgtgcttcttgtctgagatcctcccattagctccttcatcatgacccctgctcaccatggcccctgtaaagctgccatctctgacttctacatgtgctaccaggttctaactgcagcccttgccctttcttctttgtcaggagggagcggaggcgccggcaccacatgtctgtgtgggaacaacgcaccagccagctgaggaggcacatgcaaatgtctagccaagaagccctcaacaaagaggaggccccgccaatgaaccccctcaatccactcaacccactgagtcctctcaaccccctcaatgctcaccccagcctttatcggaggcccaggcccattgagggcctagccctaggtctgggtcttgaaaagtgtgaagaagaacgcatcagtcgtgggggctccctcaagggggacatagggggcctgactagcgccctggacaaccagaggagccccttgtccttgggcaaacgggagccaccgtggctgcctagatcctgtcatggaaactgtgacccaatccagcaggaggctgggggaggagagactgtggtgacttttgaggaccgggccaggcacaggcagagtcagaggcgaagccggcatcgccgagtcaggactgagggcaaggactctgcctctgcatcccgaagcaggtctgccagccaggagcggagtctggatgaaggggtgtccgttgagggggagaaggaacatgagcctcacagcagccacaggagcaaagagccgaccatccacgaagaggagagaacccaggacttaaggaggtaaaggagtcccaggagggcactgaagagatgtagttcaggtttctgtgaggaattctgtgatggaaacctatatgggcctccgttttcccttttataagatagagatgatgcctaaacaccatctaaaagtcacggcttaatttaacaggcaacctaacccctgcggaaacaatgttctattccagagcagctcggctgagagtggagcctggatagatggatagatgggaatcagtcagtgagcatggcccatgagtgtttgcctcactgtgtctggatgcagatggaagatagaatatgctgtcaggcctgctcctgttccttctccctttccttttagccaggtgcatccgccactctagaacagcttctgaaacataaccatctcttggtctttattctcaggaccaacagtctgatggtccccaggggctctggactggtaggggctcttgatgaagcagaaacacctctagtccagccccaacctgagctggaagtggggaaggatgcagctctgacagagcaggaggctgaaggcagcagtgaacaagcccttcttggggacgtacagctggatgtgggccggggcattagccagagtgaaccggatctctcctgcatgacagccaacatggacaaggctaccacggagagcaccagtgtcacggtcgccatccctgatgtggaccccttggtggactcgacagtggtgaacagtgagcacagtccctgttctgtcaccccctcccacccaactggagctgaagacagctggctctggggcccctctactaaagctctaacaaataatagaaaggcactccaacaggactaaaacatttttcacagtcttgagacagtgttctcctacagagttagacttcccgcaactgtatttttttttttatcctgtagaacttggtcctatgagtcttcaaagtggttacatgtgagcttataggcagttgcgtcctggtgtaaccagatggcatccttgtgacctctgggagaactaggagatatcctggggtagactagcagataggtgttgctatggttactgttctgctctaaaggcctgcatctttggaggcctcggtgccacctataatagattcccctgagatcatccctgcgctaacatttcctgactctattattcctatcaattctctctctctcctaggagctctcagtcacactttcccatcaagactctttcatgcagaggttaatctcgaaacactgacagaaaactcaaggggaaagcatttaacctactaccttactgggccagtacccaccttttcctggaccacatttctctcttgcattcatgttatccctgtcctcaccctgaccacatattccatgatgacatcaatcctatgtccagttcctgtattgccttaccctaatcactgccttgtacctaatctctgccccagccctaaatcccttccctgctttaatcccattcctcattctgacttgaaccctgcacctcttccctttttactcattccctttattcttatccccacatgtcacccttgcattaatcccacaccctataatctgccccctaccctatccttgcattcatccacaggctatccctgcccctacacccatctctgcattaatctcgctgctgtcctgtgatcacaggttatggtcatggggttctatcagtgtgtgttttccttctctttccatcttctgtcctgtgacagtctcctcgtctccctttctgcctctctacctctgcttcccttccactcttgcttcaaatcatctgccctctgaaacaacagatcagctttaaaaaattgtaaatctcccatgccccgtgcttgctggggtggactggggcatgtttcaggattgcaggtccacagtcacttttaatgtctgtctgattttgtacttttataaaataagaagtgctttggagcctctttttataagaaacaacattagcttcaccatctctctgttttcacgctagggctggtgtggatcctgcatcacagtacagtatgcgataggaagattttaggtacttagctattagaaggtcccaacatgggccaggaccataaaggtaccatgagtctcagggtagtgccacttcttggccatagggacgtgggggtggggtggttccccaggctttctctccacactgacagctttcttcccccccacctcctacttgagcacagaaacagaaagtagccacctgacattgctacgtgacccctgtctgcttcttcccccccagcactggaacgcagtcacaggcatatattcacatgaatattacatttccatttctatattcatcgtgctggagaaggtacagccagagaagccgtatgccgagagtaatggtttcttgaaatcttccactgcagagatcttctgaaggtgtataggatttcagattagctgtatgaccttagggaaggcatgtagactctgaacttcaggtgttttgtgtttttttttaatctgtataataggaataatagtgtataccacttaggtgtggttaatatgaaaattaaagttcagtggatgagctgaaaaagaatgtggagtcgagacataatttctgaattgtgaaagcttggtagctgcagtggtgtgctgtttccgacactacaaaagtccagcaataaaagggaagctatggttcttacttctatgacacaaaaggctgtagtatgtaacgtgggtatgggtagggataagaagtggaagacttgaggtagtcctcctctggggaggagtcctcatttggaggactgatgctgtcagggtaccttcccagatcatctttggcatccccttcctatcctatccattctgttcccaactgaaatgaaaaagcacacctgtctgcgggtttctgaagattaaaacctttctgcttgcagttagcaacaagacggatggagaagccagtcccttgaaggaggcagagactaaagaggaagaagaagaggtagagaagaagaagaagcagaagaaggagaagcgagagactggaaaagccatggtgccccatagctctatgttcatcttcagcaccactaacccgtgagctatgctcctgttgcatcccactatggtactaggagagagagccagtatttgagccagactgggatgatggagaggaagtagggagccctgttatcttcctgagtcctcctggcagagagtagctagaaagggaaatatttggagcccaataagtaaggtagggcattaagttgaacagcctctcatctctgtgtccatagttcccacggtaactaaagacagaatacaggagaaatatcacaggaaaagacccttccttgctctttgatcagcagttagaataaggaaaatgaaggcagtctccttgaggatgtctacagatattctagaagaggaaacactatggaccctaagatggtcaaacatctactggagtttaaaggtttgatacctctgttctgcatatggagttttggaaagagtttcctctcccagggcagaggtagaggaatgaagaaggtgtgttagagaagaatctagaatgttaggttcaagaaatatggaactaagaaaagggtgtgagccttgtgccctataattggcatatagattggcttctgagacaggaaagcgaccttctgtggccatgtgggcagggttcaggcacatctgtgggatgggaggaagccgggttaagatgccagatcatcaaaagttgtagtatagaataaagatatttccatcagaataatcaggaagccatagaaacatcctcatcagggcatttgtttcttgtgtttcttggttctttatgatttcctaggcaggtcctggtttcattgcttaagggagaagacaccaagatgcatcagaggacatcacatgccgctggggattgcgtagtctcacgtggctgttcctcacggctcactcatgtgtgcagataatgaatcttggctttcgtgacatagcctctaaccaatctgattacctttctccaccagggcctggaatcaaggggtggtgcttgagaaattaaattgctctccctggtggcttcctttgtcaagggcctggctagctggaagaggccaatgtaggcttatgagaagtatgaggggcaggcatgggaacgatgtagggccagctcaacagggtgagctcaagaggcttttctcatccacaggatccgcagggcctgccactacattgtgaacctacgctactttgaaatgtgcattctcttggtgattgcggccagcagcattgccctggcagccgaggaccctgtactaactaactcggagcgtaacaaagtgggtacacggttggggggggggcgggatttgccaatattgttgatgccctgggatcttttctatccagagccgctccctccaacatcagaggagaatcaagataggctaacaggaaggtttctgggaatgaaaaaagatagagaagttgtgcttattcctcagagacaagtatgagccatttcccacacccacaaccacaccactatttttaagctgcagaagcaggcttgacacccagaactagctaggcttctgagagggttcggctgctattggaaggtctggatgtaggctataacatagaaccataagtgatgtgtgtggatgcagggggactgtgggtctaccacaagtcattgacttatctcctgggaaccccacaggtctggagagaaagttttatggggaacaattcagaccctagaagttaagttatggtcaaagggggggaatagcttctggcccacgtggctcaagcaggctctctggtcccttttttcttgttttccctttttagcctgctattgatagtatgaaaaaatccctctctgtgttctggtgtgggagtttttgggagacagggtcatgcaggatggaatgggtcagggggcaggtatgcatagagctcagtgaccttacacggtcttctttgtctcgttcatgtgtgtcttccaggtcctgagatatttcgactatgttttcacaggagtgtttacctttgagatggttataaaggtaaaagtttccagagaaaacatggactctgaatttcagttgtatcaatggtcagctcctttagtttagggtactttcccaataatgcaatctcctcgtctatgacaataccaagagagtttctccaagccctctctcacctcagtgttctcagtaggccatggctgtgtggatgtgattaaataatgtagctctcttgtcatggcctgaacaggaggcaggtagtaggtgagcatacagcttgagtgtggtgtagttctgcacaggcacttcccttcttattcagagaacgtgtctggcaatggtttagggagatgtctttccagactccatctaactccagactccatctaacatcctctcccctctagactctgagcatcccaacagaactttctcattccaagtttaacctgtctggggtttctacccatccatacaggtgtggcagtgtttggagctctggaacatagaggagcgggaggttaaatgggattctgtaatggcagagaaatctgcttaaaccctatatgactttgagaaggggtctgagtcctcactgttcactggagatattatgtgattatgagaagaggtttcagacctcatcattatccagagtttgctggatactctccttactcctcaggttctgagtttggctattgtcttacttagggtttctattgctatgaagacacacacacacagcaattcgtataaaggtaaacatttaattgggactagcttacagttaagaggctattccattgtcataatggcaggaagcacagtggcatgcaggcagacatggtgctgaagaagtagctgagagttctagatttgaatctacaggcagcaggaagagagagagactgagactggcttgagcatctgagacttcctccagcaatacccttcctccaacaagaccatgcctacttcaaaattgtcctaccttctaatagggctactccctatgagcctatgggggtcattttcattcaaaccatcatatctatggagacagtggcagtagagccctgggaagggaagctaggtgtaggtgttaattacaccaggagtctaatctatgacggttcaaacccttgtcctgcagatgatagaccaaggcttgatcctgcaggatggatcatacttccgagacctctggaacatcctggactttgtagtagtggttggtgcattggtagcatttgctctggcgtaagtagatgcttttctgttctagtcccttacctttcttcttctattatccctggttgatttgaccctgtctccaaagagcaacactctgagagtctgcttaccaatagttctttgcagaggccttaaggtcttacagttccagttcatgtgtcctaaacaaaaaaagcaagattgaagagcatcagtaggaagaagggaggagccagggcattatgaagaatgatgcagaggcagagcagaaatggggatcccagaatcctggtcatggggaagaatatcctggaacacatttgagaaagacagatgcttccaggaacattttaaaaacactacccaggcagggaaatgacccagcaagttggatatcaggcttctgtgctcaatctataccctcttctaccacaaacaggttcctttttgtctggttagcatgtaggcttcctcaaaaccatccttccagcctttttgaaccttgtcctctaggcaagactgaacacacttttcttctgattgggtagaggaagtatttggatgctgctttcattgatgctgcagcatcaatgatacaggaaaaggaaagatgtttccatagcgttgcccttcgcatctccaatgtgttagaaaacaattgttctctactcactttctccacttcgctggaagtgtctatcccatatccacactggcagttaaataggcagggtaagaactaaggggtcaggggcagcgatgccgtgtacagaggtgagagttcccagatgtgttaagtctaaaattttccagagcctggaagaacactgtgcccattgctgcaggagcggtgggtggccctccaacagagccagagtatgggtgtgcccctgagacgggatggtagcagagtattcattgtgtcttgtcccaaccatgtgcacaggcatcccaataccattagagcaatggagagtcatctttgccttcacataatcaaatcttctgtaatgtaaatgtagctgaactgttcccaaagagatttcacaaaagtgtggtatctccctacctatccagatcctgtgtgggttctcacagcaacatacaaaaaaaggcaaccccatctctaccaagggaactcccagcttctcttcctccttggcatgattcactaaggtctacttttgccttaagaatgccaaccttgttctctgttcattaaagacaaataaaatatgatcatcggattgttaaaaggtccagttctctttccatctcctcagctcacttgtatacatctttcattattgtttctcagtagcacactctgcctgtcttttggcagtggacagagagaaaagcatagtgggcagaactcaccagcacttttcagaagaacataattcacaggtgacagggcagaagtaggaaggggacatgtatggggtcaatctaagcctagcttgaatcccagcccttcttcttcttagcagcttatgtctttgacccattgtagcaaaatattaatattcctaacctccatttcttatctcttaaaatggagacaaaaataaggcatgcagagtacttaacaccagggctggctgttggtgtgaatgatcagtacatgttagtttgttgctttaaccttctaattcctcatgacatcaaacgtggcagcaggaataaattatgtgctgctgtggaatttacacatacagttcaagacagatgaaggctgggccaagactcaactgcttccatccagctacctcttccccacaacccttgagcctaagtccctagcaaccagctggtgtactggggttggaggataggaagtggccttgaggggaagcccatgaatcttgtcctatgccccagtgtccaaatgtttatctttgggctcttttgacaccagtgtgctctagggttgtcctcggcctcattttctcttgtgctccttgagaactggcagcaggtggcttcggtgctagaggcaaggagacccttattagcccaagttcagaagactctctgttgtcaggtgtactacaggggactccagaaagcctctggttccagggtccaagtttgtaggatagattatgagctatgatccattctttgcctttagtgaaatcttatcttggaccttatttctctctgaactgtgcatggtccttgctccttctccattgttctcttttgttgtcacccttcctagcttgccatgcctcttcccttccttgtttcttctcctttgaccctcatcacattggctaaggtcctggtaacacttcccgatgttcatatgcctataaatcttaactctgtgctttctctttccttcctgagggccccagagaattcagctcttctaccacatatgacaggatccccaagagttccacctgtcagcaaccagggtcagagaatggaatgaagtcaccaagcccatgatctacatggtcagatcaggccaacaggaaaccatatttggggttatctggagacctttcaagtctctatcttcttgttataactttcattctcgtgtcctgtgggtattccccagtgactgctcactgcccacatagccgttttcacaccccagtttctctccttcccccttgaaaattgaatgttcccctagtgaggcttccacaaaagtgattgctttgtcagtgtgagcaaccaatggaggttgccacattagcatcattatctggttccccagaaaccagaagtgccttattatctcttctaccactgccagtgaaagaagccagcccaattccccagagcagtgctactgaccaagggacagactcccactaaatactcagagaatgctgcaaagtccagagtctgtctgctgcagagatctgcagctcccaccatctttgctctctacaaacattcatgtgttgtatgtagtggctgaggaaatctctattcaatgtacatcaaatataatataaccctggcattctatctggaaacttagttgacttgttaaaagaaaggggcgggggtagggtgtttttagtgtgggaatatctgggtttaaaaatatcccattgcaacttttctcttcttgccagtccattcttacattataaggtgcttatgagaacatcgggtgctccttccaaggccaatatctcctagagaatgagggagcaggagactttagcagagattgataataactccccctgaaactctcatcacactatcctgttttttatttttatccacatagagacagatttgttttctgtcaatgtcccaatgtcttttcctctttgaggtttcaagaaaagtctgaggaatgactaaatccacgaaaccttttgccttgcttctctctagaaagggcacatttgtcttctctgcatggttgtcattttctcctgaaacactgaggcctgctgtcctctgtctctacagtctgttgctattctacctactctttggcctcaggtgtgagaaggcaaagatggctacagcttcatcatttctagatacctgaacatcaagcgcacactttagggctcccctgccctccagactcagggatatagtaagcaagtcagggaaccacaaagtaggttacatcttgagccttaaacctctactctgaaccatgaagcttaccctttttaatacccactatgtacaacagtttacttgattagcggaattatatgaacagatgagcttctgtgtgcattctcaataggaaatttgcagctatcactgcttgtagctctaaacatttaataataaaaaaaaatgtgtcaatagtttagcctccaccttccctacctcctatgtggcagagtcaggcaagctctctggtgactgatgccaggattttccataattgtttgctgttatagcaggccatgaggtgaggtcgggactccctggcacacaagggaatctggccacacttggcctgtcattatttagtccttggccagaagcaaaactatgagtcagctagcttgtggatgccagagggaaccagactgcccatattagctttcattgaagtgtgtcactttcctgatacttgacaccctgccctggtggctaagaggtatatatacagtctctcgaatgcactgagcacaagccaccgcggctgagctggttctgagttcattcagcgaaacccatagacacaggcaatctgagatttggaagtgccttctggggcccacagcgttcgtccctctgggatagttcatctgtggggggttgtgtttctgaagctgaggatacacgtgtcattggaaaggtgtgactatttggaactgaaatatgtgtgctcatttacccagaagggcttagaaataccgaacaaacctgtcatcagaacctagctatttacacacaccccccatttttttcagtgatgcctgggtctaaagtagttcctcacaatgaggcattttcttgactgctcttctagaactaaaaaggagagtttcccaaagaaatctattactatactttgtcttgaaggggcaaaaaatggacctatttactacagagccagatatcgcatccagttctctttctcttactcaggaagaaaatgaagcttgaaaattgcatttagccaccaggtagcccattaactgtgaatttagagcttctgttgcaaaggaattggaaatgtccagcagtgagcagttaggatgctgaccctaagaatctggtttctcgagctacttcatctaactttgtgtctgggtcaggaaactaaagttgatcagtgcttgtacctgcaatggggattccattgctgtattttatcctgctggcctaaagatagggagagagagagagagagaaagagagagagagagagagagagagagagagagagagagagagagagagagagagagagagagagagagagagagagaagaggacacatggaagagaatttccattctacttgctcttgtaattaaggtccagaatatagcaatgtagcacatctgaaattgacattgctaagaagcagtccatgggatgtttagttgtagacattctatgggtgtgaattctcaagtatttctgtttatacactgctcaaatttggggtatgttgcaagtgggacctcatccaatggacacagaaataggctaaatggaataaaccaatcaggggtcccagctctatccagttgttgaaccaaccagacccatatgcaaaaagcaccctctataggaagtgagacttcatggctacaggaaaagcctggttttctgagactggtgaaaagtcatcatagtagccttcatgcttaaaagtaggctgtagagctctcaggatagaaggttgtataacgggtcctaggaagtttctgccaagattgtgtgacctgctaagcatgtgttcagtcacaggacacaaccttaccgtataaattagtctgcagctgaggagcggcaccgactagacgtcagtgggcaaggcctccctacaaagacgaaggatcattggttatgtttggaacacagggactaaaaagaaatacaaatcaggtcactctcctgcagtttaaataacagaactgctagcagacagatgcgctgctgcctcctcctgctgcttggtgcttggacaaaaataccttccagttggagtagagtgatgtgtattcaatgcattagaagttcactgaggtcaatatgcaaggaagaaaggattatgcaccaaatactttgcacaggatgagttttgtggttacagaacaaagatgacaggtaaactacgggtttaaggtacataggtgaccaggagagatgctgggggcagaagagaaaaatcctcaaaaggcagcagctaagagtaaatggtcaaagtgctgaatttcctttctgcatgcaggcagctgaacttgatttcccccacaccttctagaaggacaagtactctttatttcgttgctaacattcggagagcctggtggttagagctctggctgatgtgactcatgcacataatgagtaaatagcagagccaggtcctgagcaaactcactgtgcagaattcaagtttactgccttttctagtatgttaagctctctcctgccatgctgccatggctagttacaacctattaatttcctctgcagatccttcagtcttcacctaggtcagggaaggcttgcagggcagatggacaaaagtatccataagtctatctatcttgatattgtacctgtaccttttccttcccatcaacagtctctacaccagtgagggggagtaaggcagacaggttaatggttgagctgagtaaatactaatctctgttgctgttctatagcaatcctcagtggttcccatttaaaagacattaaattctaatgtcctaggcagatttgggtctgaatcttctgtcttaactctctttaccccatnnnnnnnnnnnnnnnnnnnntttcgttgctaacattcggagagcctggtggttagagctctggctgatgtgactcatgcacataatgagtaaatagcagagccaggtcctgagcaaactcactgtgcagaattcaagtttactgccttttctagtatgttaagctctctcctgccatgctgccatggctagttacaacctattaatttcctctgcagatccttcagtcttcacctaggtcagggaaggcttgcagggcagatggacaaaagtatccataagtctatctatcttgatattgtacctgtaccttttccttcccatcaacagtctctacaccagtgagggggagtaaggcagacaggttaatggttgagctgagtaaatactaatctctgttgctgttctatagcaatcctcagtggttcccatttaaaagacattaaattctaatgtcctaggcagatttgggtctgaatcttctgtcttagctctctttaccccatgaacttctgcttccttacatgtgagtggagatgagaaacaactacatttggtcctgtgagaattaaatacagtaaaatatgtttcatgtccaatacagtaccaggcacttaagttgaataatgagtggtagttattgttgcctaccaactaatggtccaggcacatttgcagagtaactgaccttgttctaagcttgagactctgcctcctggtttgtaatctttcaagcctagctcttccctcctagaggaggatagaggccatgatacttaaaagaaggaggggctcttcagaacccagtgtccatgttctgcccatttttttagcagaaatctgctggagagtaacatccttggaggaatgagcgaacaggatgaaagtaaaggcctaatgattgctcatgacagagatggagggcaacttggcagctgaactgggaaattctcctcttacactgatggggcatggggaaactgggttttgttattctaaagagcaaataagtagaaaataaatggttaaaaaaaatgagtggccccactgagtcccaattaaagtgagaccagggcatcctagcatatgaaattatcttagagtccattttaaacccattaaagttcactaatgagttacacagtgtaaaaaaaaaaaaccctcattatacagttagcaacaaagattaacaccgttatcaagttatcaagtgagggttttgttttggttttttttttttgtttttggttttttttgttgttgttttggtttggtttttggttttggtgttttgttttgttttgttttgttttgttttgttttgttttggtggtgtagggggatgggttgtaaaaagtacatgaactgtttgcaaaacaatctgccttgaagtgccagcagagcatcgtgtcttagactggcaaagcatggtctctgcagctctggctttcacaggggatgtgagggaaaagtgctttggctttgtctgggtgtaaattatatattttagttagtgatggtgacgttgctgaagttttccttgactctgttattttattttatgtttaccttatttcatgttttaatgttgatttattgtggaatttttgttggttttgttttgttttgttttgtttgttctttgtttttttgtagcagggcatcctgtagcttgggctggacttgtggggtgatgctgccaaagatgaccttgagctcatggtttattctttttcaatcctcgcatttcaaattgccattttcaagtcagtattgaccctgtgctagtgaccgacaggtcggatgcaaggatgctctcctcaacaccaactcagaaccatggtttttgttttgttttgttttgctttgcttgtttgtttgttttctggtgccaggaattgaacttgggccctcacatatgctatgaaattatagtgttttagtggttcctctgcagtaagcacattagaatttccctttgttccataccgtattttctaatcactatatatataccctaacgtgtcaaaaagtatggaatgttggtacattctaatattaacagctaggtctgtcaaactattggggttacttggcccattctgactcccaagacctgagcaaagataacagttagacataggcttcaggtttgaaaattggctattaattattctgtactctttaaaacaggtcacagattttgtgagcttttctcttttttcattaattaattttacatcccagtcacatcccccgcccctgctctcctcccattcccatcttccaccccctctttctcatcctgggaaagatttgggggtgaccctagctgagactcctagcaggagatatggggcttgaagtggccatctcctgtaacaaggtaggacttacagtggagggaaaggaacaccaacacacccataaaaccttcaaactacaagatatgcagggataaagatggtgcagagattgagggaacgaccaactaatggctagctcaactttagacccatcacataggaaaagagccannnnnnnnnnnnnnnnnnnnnnnnnnnnnnnnnnnnnnnnnnnnnnnnnnnnnnnnnnnnnnnnnnnnnnnnnnnnnnnnnnnnnnnnnnnnnnnnnnnnnnnnnnnnnnnnnnnnnnnnnnnnnnnnnnnnnnnnnnnnnnnnnnnnnnnnnnnnnnnnnnnnnnnnnnnnnnnnnnnnnnnnnnnnnnnnnnnnnnnnnnnnnnnnnnnnnnnnnnnnnnnnnnnnnnnnnnnnnnnnnnnnnnnnnnnnnnnnnnnnnnnnnnnnnnnnnnnnnnnnnnnnnnnnnnnnnnnnnnnnnnnnnnnnnnnnnnnnnnnnnnnnnnnnnnnnnnnnnnnnnnnnnnnnnnnnnnnnnnnnnnnnnnnnnnnnnnnnnnnnnnnnnnnnnnnnnnnnnnnnnnnnnnnnnnnnnnnnnnnnnnnnnnnnnnnnnnnnnnnnnnnnnnnnnnnnnnnnnnnnnnnnnnnnnnnnnnnnnnnnnnnnnnnnnnnnnnnnnnnnnnnnnnnnnnnnnnnnnnnnnnnnnnnnnnnnnnnnnnnnnnnnnnnnnnnnnnnnnnnnnnnnnnnnnnnnnnnnnnnnnnnnnnnnnnnnnnnnnnnnnnnnnnnnnnnnnnnnnnnnnnnnnnnnnnnnnnnnnnnnnnnnnnnnnnnnnnnnnnnnnnnnnnnnnnnnnnnnnnnnnnnnnnnnnnnnnnnnnnnnnnnnnnnnnnnnnnnnnnnnnnnnnnnnnnnnnnnnnnnnnnnnnnnnnnnnnnnnnnnnnnnnnnnnnnnnnnnnnnnnnnnnnnnnnnnnnnnnnnnnnnnnnnnnnnnnnnnnnnnnnnnnnnnnnnnnnnnnnnnnnnnnnnnnnnnnnnnnnnnnnnnnnnnnnnnnnnnnnnnnnnnnnnnnnnnnnnnnnnnnnnnnnnnnnnnnnnnnnnnnnnnnnnnnnnnnnnnnnnnnnnnnnnnnnnnnnnnnnnnnnnnnnnnnnnnnnnnnnnnnnnnnnnnnnnnnnnnnnnnnnnnnnnnnnnnnnnnnnnnnnnnnnnnnnnnnnnnnnnnnnnnnnnnnnnnnnnnnnnnnnnnnnnnnnnnnnnnnnnnnnnnnnnnnnnnnnnnnnnnnnnnnnnnnnnnnnnnnnnnnnnnnnnnnnnnnnnnnnnnnnnnnnnnnnnnnnnnnnnnnnnnnnnnnnnnnnnnnnnnnnnnnnnnnnnnnnnnnnnnnnnnnnnnnnnnnnnnnnnnnnnnnnnnnnnnnnnnnnnnnnnnnnnnnnnnnnnnnnnnnnnnnnnnnnnnnnnnnnnnnnnnnnnnnnnnnnnnnnnnnnnnnnnnnnnnnnnnnnnnnnnnnnnnnnnnnnnnnnnnnnnnnnnnnnnnnnnnnnnnnnnnnnnnnnnnnnnnnnnnnnnnnnnnnnnnnnnnnnnnnnnnnnnnnnnnnnnnnnnnnnnnnnnnnnnnnnnnnnnnnnnnnnnnnnnnnnnnnnnnnnnnnnnnnnnnnnnnnnnnnnnnnnnnnnnnnnnnnnnnnnnnnnnnnnnnnnnnnnnnnnnnnnnnnnnnnnnnnnnnnnnnnnnnnnnnnnnnnnnnnnnnnnnnnnnnnnnnnnnnnnnnnnnnnnnnnnnnnnnnnnnnnnnnnnnnnnnnnnnnnnnnnnnnnnnnnnnnnnnnnnnnnnnnnnnnnnnnnnnnnnnnnnnnnnnnnnnnnnnnnnnnnnnnnnnnnnnnnnnnnnnnnnnnnnnnnnnnnnnnnnnnnnnnnnnnnnnnnnnnnnnnnnnnnnnnnnnnnnnnnnnnnnnnnnnnnnnnnnnnnnnnnnnnnnnnnnnnnnnnnnnnnnnnnnnnnnnnnnnnnnnnnnnnnnnnnnnnnnnnnnnnnnnnnnnnnnnnnnnnnnnnnnnnnnnnnnnnnnnnnnnnnnnnnnnnnnnnnnnnnnnnnnnnnnnnnnnnnnnnnnnnnnnnnnnnnnnnnnnnnnnnnnnnnnnnnnnnnnnnnnnnnnnnnnnnnnnnnnnnnnnnnnnnnnnnnnnnnnnnnnnnnnnnnnnnnnnnnnnnnnnnnnnnnnnnnnnnnnnnnnnnnnnnnnnnnnnnnnnnnnnnnnnnnnnnnnnnnnnnnnnnnnnnnnnnnnnnnnnnnnnnnnnnnnnnnnnnnnnnnnnnnnnnnnnnnnnnnnnnnnnnnnnnnnnnnnnnnnnnnnnnnnnnnnnnnnnnnnnnnnnnnnnnnnnnnnnnnnnnnnnnnnnnnnnnnnnnnnnnnnnnnnnnnnnnnnnnnnnnnnnnnnnnnnnnnnnnnnnnnnnnnnnnnnnnnnnnnnnnnnnnnnnnnnnnnnnnnnnnnnnnnnnnnnnnnnnnnnnnnnnnnnnnnnnnnnnnnnnnnnnnnnnnnnnnnnnnnnnnnnnnnnnnnnnnnnnnnnnnnnnnnnnnnnnnnnnnnnnnnnnnnnnnnnnnnnnnnnnnnnnnnnnnnnnnnnnnnnnnnnnnnnnnnnnnnnnnnnnnnnnnnnnnnnnnnnnnnnnnnnnnnnnnnnnnnnnnnnnnnnnnnnnnnnnnnnnnnnnnnnnnnnnnnnnnnnnnnnnnnnnnnnnnnnnnnnnnnnnnnnnnnnnnnnnnnnnnnnnnnnnnnnnnnnnnnnnnnnnnnnnnnnnnnnnnnnnnnnnnnnnnnnnnnnnnnnnnnnnnnnnnnnnnnnnnnnnnnnnnnnnnnnnnnnnnnnnnnnnnnnnnnnnnnnnnnnnnnnnnnnnnnnnnnnnnnnnnnnnnnnnnnnnnnnnnnnnnnnnnnnnnnnnnnnnnnnnnnnnnnnnnnnnnnnnnnnnnnnnnnnnnnnnnnnnnnnnnnnnnnnnnnnnnnnnnnnnnnnnnnnnnnnnnnnnnnnnnnnnnnnnnnnnnnnnnnnnnnnnnnnnnnnnnnnnnnnnnnnnnnnnnnnnnnnnnnnnnnnnnnnnnnnnnnnnnnnnnnnnnnnnnnnnnnnnnnnnnnnnnnnnnnnnnnnnnnnnnnnnnnnnnnnnnnnnnnnnnnnnnnnnnnnnnnnnnnnnnnnnnnnnnnnnnnnnnnnnnnnnnnnnnnnnnnnnnnnnnnnnnnnnnnnnnnnnnnnnnnnnnnnnnnnnnnnnnnnnnnnnnnnnnnnnnnnnnnnnnnnnnnnnnnnnnnnnnnnnnnnnnnnnnnnnnnnnnnnnnnnnnnnnnnnnnnnnnnnnnnnnnnnnnnnnnnnnnnnnnnnnnnnnnnnnnnnnnnnnnnnnnnnnnnnnnnnnnnnnnnnnnnnnnnnnnnnnnnnnnnnnnnnnnnnnnnnnnnnnnnnnnnnnnnnnnnnnnnnnnnnnnnnnnnnnnnnnnnnnnnnnnnnnnnnnnnnnnnnnnnnnnnnnnnnnnnnnnnnnnnnnnnnnnnnnnnnnnnnnnnnnnnnnnnnnnnnnnnnnnnnnnnnnnnnnnnnnnnnnnnnnnnnnnnnnnnnnnnnnnnnnnnnnnnnnnnnnnnnnnnnnnnnnnnnnnnnnnnnnnnnnnnnnnnnnnnnnnnnnnnnnnnnnnnnnnnnnnnnnnnnnnnnnnnnnnnnnnnnnnnnnnnnnnnnnnnnnnnnnnnnnnnnnnnnnnnnnnnnnnnnnnnnnnnnnnnnnnnnnnnnnnnnnnnnnnnnnnnnnnnnnnnnnnnnnnnnnnnnnnnnnnnnnnnnnnnnnnnnnnnnnnnnnnnnnnnnnnnnnnnnnnnnnnnnnnnnnnnnnnnnnnnnnnnnnnnnnnnnnnnnnnnnnnnnnnnnnnnnnnnnnnnnnnnnnnnnnnnnntgtctgcaagcataacagagtatcattaatagtgttaggagttggctcttctcctatgcgatggaagttgagctagccattagctggtcgttccctcaatctctgcaccatctttatccctgcatatgttatagtttgaaggttttgtgggtgtgttggtgttcctctccctccactgtaagtcctaccttgttacaggagatggccacttcaagccccatatcttctgctaggagtctcagctagggtcccctccaaatcttcccaagaacttctcccatcccagttctttggcttgttccagagatgtcccctctactgatttcccttctctctcccagatctctcatcccccaactccactccccctccacatctgatccttaccctagtgcctctccccatcacactccttccccacacccagttccctgttctttctctccatccacttctgatgtctattttatttccccttctgagttagagtcaagcattctcccttgagccctccttgttatttcactttttagggactgtggattgtagcatggttttcctgtaatttatgactaatatacacttataagtgagtacatatcttgtttgcctttctggatctgggttacctcactaaggatgatattttatagtttcatccatttgcctagaaatttcatgatgtttctgtttttactagctaagtagtattccattgtgtaagtaccacattatatttatccattcttcaggtgagggacatctaggttgtttctagtttctggctattatgaataaagctgttataagcatagctgagcatgtgtctttgtggggatgttggagcatcttttgggaatatgtccaggagttatatagctgaatccttaggtataactatttccaattttctgagaaacagctaaactgtttcccaaagtggttgcacaagtttgcactcctgctagcaatgaaggagtgttccccttgctccacaacctcatcagcatgtgctgtcacttgagtttttgatctttaagatcattctgacaggtgtaagatgattctgacaggtgtaggatggcatcttagagttgttttgattttcatctccctgatgactaaggatattaaacatttctttaagtgcttcttggacattagagattactctgttgaaaattctgtgtagctctgtaccattttttaattgggttatttggtttgttggtatctaatttcttgagttctttatatattttggatattagccttctgtcagatgtaacctttgtgaagatcttttcccactctgtaggctgctgttttgtcctattgatgttgtccttagctgtgaaaaagcttttcagtttcatgatgtcccatttattaattgttgatcttggtgcctgaattgttggtgttctgttcaggaagttttctcttgtaccaatgcaatcagggctgtttcccactttctcttcttttagatttaatgtgtctggtttttgttaaggtctttgatctacttgggcttgagttttgtaaagggtggtaaattttgtgttttatctatgtggaagaagaaagtaatgttggtcatgtttatatgaggtagcttctatgatctctcagaacctttcttgtgctattggatgtaaaggcttctgggttgggctggggttaaacagacggtaaaatcaagaggatcgtgctcctagactatatgtctgtatgtccatctgctactctgtcctcacatcttaggatatgctcaggaaaatgccacctgatggaaagagacctgtgttgctgtgttggtgaattaatagaccacacgattccatcattactttcatttgtgtgcttattggattgagatctgtcttctcacacttgatcttagccaatgaggcaatgaggtctgtcttctctaccagactagctaatcttccaaaatattagccagatcatttgttccagtaggaataagacctgtcaaggatggaggattccatagatgctcattacattgcatttctgtcctctgatcatttagagtttttcacattaaagatttcaggttataagtccccaatttcattcccagatcccttgacttttgaaggacggtaagaatattcatctcagtgttgaaacagagatagcttttcttctaagagtggtacagcaaacagtttacaatggaagcttctcatataattgcaggaaaagcagcttttctataccaccgtgataaagaaaagtccttttccttgtttgagtacaatttagtgatattggcttctgagttttggaaagacatcagcatgcacctgtttggttgtagttacatcatccctcgtcaggtaaagctattcaatgctactgtcacttgaaatgccttttctgagagtttctgacacagggcagataccattcctcctgcttggctcttataaagtaatcagaggcatattttgtcttaagattcttaaggaactgaaaatacaaaagcttacatttagaaaagtgtcattaatcctgacccctggaagacagtaccagccacggtacctttgaaggcaaggcctgctactgctttaaaaaaaaaatgtttgcaatgtgggtggaaaagggcttgtggagcatatggtgttctgtccttcctttcaaaagccctgtggatttgacaagactgtgggcgggatcccatggtcctctgcttcatagcctggcatggctgtaagggcttctctgcttccttaggttttctgactatcctttttctccatcttttcccttcctgcttcctggctggatccaccataggaacgctttggggtaactatgatttttttactttgctttattttttttcttttagtagaaggtttaggggactaggtgggaggagggggaaactgaaaagaaattggaaaagacagagctaactcaatgagaaaggaatgttgggtttatatgaatggcatgtttccattgagagccaaaagcttaaaagtgagcagtttccaagccttcttgggaagtgaccattcctgttggtttgggtaggaattgacctatatgtttctcttacatgttttaggtagatgtgcttaaaaggcaaaataatttattaaacatgccagagcttttagatgtgaaagtccatattaaaaaaaaatacagatatttgggttacctttcaaaatggcatgcacatcatctcatcacctttgacaaacaagggaacttagaattctattggtataaagtcaacatgaagggttaattcgttgatttcatgccttttgtcaaaaggaaactatgacttccctatctgagtctgggcatagcagagccagttgcatgctaaatcaggtgatctccatctgatgttcttgggtcccctctccagtgagtgttaacatcatagtctgggtcaccgtgaggaaagaagcaagcctggtctcactatttagagtcttatttcccagtatgtacgtggttttacaaattgtagctatttcagttgaatacaaagatctcaggggatacgcagggagggaagaaagagatcttcattaagagaaaacactttttgagatgctgcataacaagtatcattacccataagatcaggagaaaggtgagtgtggcctacaacttggggccgctccaactgagtagttctctgaagcccatggctaggtacagagtttctgagatggaaatgaatgcaggaaaggccagccacccgtaattggagtgtgggccacggttctggcaagacacctatgcacatgctttttctgaggtggcagcctagccagcgagagtggtgtgttccccaccagtctttactctgttctccccacaccggtgagctgggagaagtaacaaacctagacttctggatcaagttccccaataagacatgctctcaactgttccctttccagccaacaaatatcttaaaaacctgctatgggaaaggactgaactaggctcagtggagatccacagtgggcctctggtcatggaatctacttgatgttatttcttttttatttagcagtttggtattacagtgcattaaactgaccactagagacatgaagcaattattaatatatgtgcatggaagttggtgtgtccctgtgtgttcctctacgtgaacacacagacatccccttttttatatgctcatatccaagtaaatacaatagaaattgaaaatgctttaaatagaaaatgcacttattacagttatgggcatcttatcaacttaacagcatattattaatactgcaaagtattaatctttaccctcatgattttgtgggtgactagcaccactgactgcctggccttgcaagagagtttctctctgtatactattagtctgtggggggaatatcccaacttgacatcatttctattgaatataatttactgttgcacagtctgaagttgtgaaaccataagttgaacagttgtgagcacatggatgcgcatatatgggcatatgcatattgatgtgtgcacatgtacaactagagagtgatttaagactcctgaagcatctttggactgccccagaataagctctacactggcccggtttctggcctcttgtctactctcatctctgcatttattctgttgttattaatgcaatagtgtggcttccacttctgtttatcccctttccaaatgactccctggggtcctctctctgcagaaccaacaaggggagggatatcaagactatcaagtctctgagggtacttcgagttctgcggccactgaaaaccatcaagcgcttgcccaagctgaaggtaatgttttcagagttttttcccatccaatacccttctttcatcttctcccgttagctacagctggctagcctttgcataatctattcttagaatatcccctttttttctcttggggattgattttttttttcatctattggagccaaggtctttgtttcaaaggaaagtaactaacatcccaagtaactcacaggtgagattctccttcttcagtccagacccagttagttttatcctcccttgagtggcctgtcatccaggaagaagactatatggctttgtcatggattgtcctgtgtcattaaagaagaagtcacagaagccctctgtattaatggtctgtgtgctagggtaggccggataatctggagtatttttcttcagtcatagttttagaaaagtttacacaaatgtttcatattttttagatacaaacaggtaacctaaggacacatagtctatttatggcagaaacagaaaagaaatggagaagtgagttaccctggataaacttcttattgccatgtcctggacaaaaataggtatcttttccatagggcttgctctccattcaagcttggcatcctacctaactcagcctcctctcttttcctccccatgtatcatggttaataaaatctgaagctccatgggagaaaagatcctccccttcttgaattcttgagaactctcagcttccagtacagagccttacaatctgattcaagtagtccaggccacccagccagtagagcaagccccagccccagctcccagtccccagccccatcctcccggggtacacaagggtgcttcttaggaatcagatttcattatccatttgcagaatccatgaggctagcataggacttctcaaagagtggccatagaccacccttgtctgaacactgaaaatcttcctaaaattcacctatctgtccatatcagcaccactgagccagactgtgagaggggcctgaactctggctcttcaacctgatgagtatatactccatagtgtagggactggccatgaagaagaacctgcatgagtactaggtccagctcaaggattttggagtgactcagaggagaatacctattcttagaatttcttgcacccagaaaatggagatctgtatactctacatttatagtatagacaagagagctgccatgagccaaaaacccagcagttactctgggagatggactactctcctctgcgtgnnnnnnnnnnnnnnnnnnnnnnnnnnnnnnnnnnnnnnnnnnnnnnnnnnnnnnnnnnnnnnnnnnnnnnnnnnnnnnnnnnnnnnnnnnnnnnnnnnnnnnnnnnnnnnnnnnnnnnnnnnnnnnnnnnnnnnnnnnnnnnnnnnnnnnnnnnnnnnnnnnnnnnnnnnnnnnnnnnnnnnnnnnnnnnnnnnnnnnnnnnnnnnnnnnnnnnnnnnnnnnnnnnnnnnnnnnnnnnnnnnnnnnnnnnnnnnnnnnnnnnnnnnnnnnnnnnnnnnnnnnnnnnnnnnnnnnnnnnnnnnnnnnnnnnnnnnnnnnnnnnnnnnnnnnnnnnnnnnnnnnnnnnnnnnnnnnnnnnnnnnnnnnnnnnnnnnnnnnnnnnnnnnnnnnnnnnnnnnnnnnnnnnnnnnnnnnnnnnnnnnnnnnnnnnnnnnnnnnnnnnnnnnnnnnnnnnnnnnnnnnnnnnnnnnnnnnnnnnnnnnnnnnnnnnnnnnnnnnnnnnnnnnnnnnnnnnnnnnnnnnnnnnnnnnnnnnnnnnnnnnnnnnnnnnnnnnnnnnnnnnnnnnnnnnnnnnnnnnnnnnnnnnnnnnnnnnnnnnnnnnnnnnnnnnnnnnnnnnnnnnnnnnnnnnnnnnnnnnnnnnnnnnnnnnnnnnnnnnnnnnnnnnnnnnnnnnnnnnnnnnnnnnnnnnnnnnnnnnnnnnnnnnnnnnnnnnnnnnnnnnnnnnnggaagggaagggaagggaagggaagggagagggaagtggaaggagggaagggtaggaaaagggggaattgaagggaaagggatggtggaaaggagagaggagggaaggggaagggaggggagaagggaagaaggaaggaacaggtcacttctaaaggggtccagactagctgtgacatgggtttgttttatatcatgcatgtagattcccaggggtaacttggtctttaaaggtagtggctttttcccttgctttcctccatcccctcctggatcacgacattctatggtgtcatatctccctgaccaccctcccactagcaagccactggcttaggcttatcaatcaccactcccatgtgtcccatctggggctccaaatgtgaacttcagtgcaagttcccatgggaacagaggaatgtgcaacagcttgacaggagcagtccacccccgaagaatgtggccgtggccttcattatttcttttaaactggggatcactggctcctctctttgttaatgaacaaacaaagccagacatgaaatgacataaatggctctgatcattccacaagtctgttgtgttgctcaccttctctgcagtgttaaactaattgatccagacatactatacccagtgctgtgaagcagcaaccacacaattgcagtatcattgtaaggccagactctccggtgagctaaactcccaaagcccagaaaataagctaaaaatggccttaaatgtatcaaactctcatggaattcctcgtggcattggaaatagaagggaagtctctggagagtctctgtttttacatgcaaactgaaacccttgtttctatccacccagcctcatccacaacacagagagacctcagtctgttctagagtcaatgttgaccttccccctgaaggcaatgagtgtgcaactagagggcagcagcgtgaaatgatagagcctgatgtagtcagagctaatatatgaacttatgataaaatactgaggtgaccaaaggtagtagcatgcgatagccctttgattcatttagaaagggaaaagaggatggtacataatcagtatgtaaataaatctgtcaccaataggttcaaggtaaagaaaaagctgtataatgggtaaagtggtctaaatgatcttctaagtccccactagcatttcatttctgggtagtgcctccacaaagaaacccctccattactttatgccatcttgtttaagcttcgtgctttatatttactttaagatctagagaaggtgtcttcttccagggcaggtccttgccaccatgaccagcttgagagtgagctcttaaccctgtgagtatctctgctcagaggggagagagcccctgggacagcttctcaatctgcagggtggtggtatggccctacctcagctcacaggaatgacacgagagcctttgctgccgtccacaggctgtgtttgactgcgtggtgacctccttgaagaatgtcttcaacatactcattgtctacaagctcttcatgttcatctttgccgtcatcgctgttcagctattcaaaggaaagttcttttattgcactgacagttccaaggacacagagaaggagtgcatgtaagagctactaccatatacctctcactactaacaaacccctgggtttcctttctctcttaactcctttcccattgaattatgaaacaggaagaattataaaatgaatagatatttgttgaactcctttattgtatcagatttggtaagagacacgttgccttaacccttaagttttaagtctttctgatgatctactgaaaggagttttatttacattttataagtatagacgatgacactcaaaatttaggttgtccaatataacaaagggttagcctaagaaaaggttagcactctgtatcagaatccgtcctacatctgctgggccccaagggccaattttattccatgttagtatttaataagacatgcccttccttttctgtgatggtcattgttaccccgacattcttaaagtgtataagaatggttgactgttccacacacttgccttaaaagcactatttcatttctattttggtttcagaggcaactatgtagaccacgagaaaaacaagatggaggtgaagggccgggaatggaagcgtcatgaattccactatgacaacatcatctgggccctgcttaccctcttcacagtctctacaggggaaggatggcctcagtgagtgatggggtgggcttggtatgtgtcttgcaggctgagatgggactgtgtgggtgccttgaaaagctgattcaagatgaacacggctaaccctttgttcttctaccaggctaagtaagtggttatgagcgggggagaaaggcagaaaggaaaaataaaaacccttcaaacaaagatggagaggaggaagacaaagtcaggaaaacatctaaaactctaaaaacccttcagataaagatggagccaaagtcaggataatatctgaaactctttttttgttttttgttttttgtttttttggtttgtttgttaatctttgagttaggtggagccctctgacttacagaacaaatgagtttttacaactttctgtccctcaggagaatccatgagggctgttttaaatggatttattcttaaggttggccctatacttgagagttaaaaggtggaggggtctggcagaccacagggatgctgtctaacactagacccctttagaaagatgcaggtttttacgctgtccacagcaggatgatgatttctttaaaagacttaggaacaagtaagacattattagttagtgggagaaatccaagtggcactagaagtctgttggtattgaacttgacaacctaactaaaagaggatagcaatctgttgcttaggagctgaatgaagatggaatataggctcgaaatggcagtagtattttttctttatgaactttgttatggtaaccccagatcagtggaggattggaaaaagtcagagaagtcatattaagagctatgaaaggtgacccatctcctaacaaagccatggatgtcatgtatcatctgtaccctctcttttggtcctcacagggttctgcagcactctgtagatgtgacagaggaggacagaggcccaagtcgcagcaaccgcatggagatgtccatcttttatgtggtctactttgtggtcttccctttcttctttgtcaatatcttcgtggctctcattatcatcaccttccaggagcaaggggacaagatgatggaggagtgtagcctggagaagaatgaggtaacaatagatagactatagtaagggacagcaggggaagcatcagaaaagaataaggaccagcatgcttagagggagagactgcattttctaactttatgatagcattaaagctatgcagtcttggatgtgggactccgtgggtaggaacactttttctagtataaggacccaagtttgaatcctcagcatccacataaaaagctgggctggtgagatagctctgtggttaaaagtacctgttaccaagccttatgatatgagttctgtctccggggccctcttcataggagagcaccaactcccacaagttgtcctctaatctttgcatgtgaattttatatatcgggcacacacacaacttttattttgttcaaaagctgggcacagctgcatgtgcctatagtcccagcagggaaacacaaacaggtaaatcctgagaacttcctggccaatcagtgaacgatgagcttctggctcagtgaaagatcccagtccagggcaataatgcaacagaagaagatgccatgaccttctctgaccaacatgtgtgtgcacagacacgtacacctatacactcacatgcatatatatcacatacagacaaggcataaaaatatacacaaaaataaacttgaaatttctacccttatatgtgatggcctagaaggaaaaaaaaagtaggtgctacagttgcagcattaagacatttgcttatgtcccttgctctcatggcatctgtgtttctaataacagggaatatgttttattgtgtgctcctccagcacatgcataggtttggaacattattagtttcatggctaggtttgttttttaacaaaggagctgaattagaaatggtcatagattataagagaaatacactggcagatacaggttgaacacctctaatataaaaatccaaatgcttacaagtccaaaacatttttgaatgatacgatatggcaagtagaaaattccataccatgaaactttgtttcatgtacaagattaataaaatattatataaattacccttaggctatgtgggtgagacacatatgaaatattaatgaattttgttctaagctgagcatcctgccttcaaactatctcattacatttgtgtaaatattaacaactcgggaaacaagtctgatatcacaaatcactctggccccacatagttcagatatggaattcttatgcagtagattgatagctataactatgggcactagaggaaagtttccccataaaatctcagccttatatggtataagatgactttcaacccatgtgacaggatgccttccagatgcccccagatgtgtaaggtgacatcttgcctatggtttggttcagatggtccctattgctgctttatgattgtgtagcactttcttttatccttaaagggtctacttaatagcgcccatcttaatagcgcccatgcaaggtttaggggcagttgagctaattctaataaccttgactttctgcagcgggcatgcatcgacttcgccattagtgccaaacctctcacccgctacatgccacagaacaggcacaccttccagtaccgtgtgtggcactttgtagtctccccatcctttgagtataccatcatggccatgattgccttgaacactgtcgtgctgatgatgaaggtaagaagtaattctgtttgtgcagtgcctgggaaatcactccaccttactagcttaccacgtttacctgatcttgcatcctggagtctctttgatcttacctacttcaatagcctagcccctgaatttctgagtaggggtagggttatggaataaaatgcagagtaacagagtagcagtaggggctctcaggaacaaaagacgtcaataaggtccacctttgacattgtggagtctaaaggagtactgaagttaatgtgagcctgatcatatttaatgctaagtgcaaaacacctaattctggaaagcgcttctgttgtgctaccttcagtttgggtatgaaggttatttttgctattaaggtatcccaggtgggacatgggtatgtgttttactacataatatgcatgtattgaaatgttctaccaggtcaagatgagagctagacctggcatgtatattccaccacatacacatatgccttaaagatttgtctctattattcttttcttccccctcctggcagtactactctgctccttgcacctatgagctcgccttaaagtacctgaacatcgccttcactatggtgttttccctggagtgtgtcctaaaggtcattgctttcggcttcctggtatgtctgtcccagcatcagcttctcttcctttggggtacatgcaggttactgctgctcaagaatggttcaccctcttgcccatctaatagggagtttaaagaggctgccatgtgagtaaagtaggagaagaggcaaaggaagccacctgcttatcgccatactgatctaacagtctatgccagtcctactgaattctgtcagccatggggcagccatcaatggattttactagaactacaattgacacatgaagaaataagataaaaattagattagcaggctggaggcatggctcagcggttaagagaactggctgctttctctaccagaggtcctgagttcaaatcccagcaaccacatggtggctcacaaccatctgtaatgggatctgatgctctcttctggtgtgtctgaagacagctaaagtgtgctcatataaataaaataaatctttaaaaaattagctaaatcttgagttatttactggtaatgtatatacttattgtatgatttgaatggaaaaatatctttcatagtctcaagccagcaaataatagattttagttattagtcttctgaccataaagtatcacaaagggtaccttctgccaatgaaaataaatgtttattacttatgttcacaatgtccaagtacttttgagggtttgggggtaggtgggtgaagattctggaattgactttgagagagagattgtaatggaaattattctggcatgagctctttttttatttctcctcaactagtaattataattgtttgacaaactcttgcatctgttcccaagactgttaacaacaaaacctgccctttgcatcagtgcactataaacaaaatccgcccctccctctcctcctgcttacttcagggtgtgccttgtgtgttcaatggggtgcagataagcccacttgacaactgtttcacagttattcagggtgtgcattatccttcccagggtatacggtccaggtcgctttcctagcacacaggggaaagtctgctataaatcaaaatgagtgcttcaggtagcagctgtaacagagcctctgagctgggcttgataattgtcagtgttggttgtggaggctgtttccagtctcccagttctttatccaaccattaatttgattatttggggtggagagttgaaaggaacccattgcaggggctgcattgtggaattcctgactcccttttgagtgttttgagattcgaggaaataaaaaggtaaaaggaaactttatcaaacaaagatgcctttataaaatagtctagcccaaatagggtgaagtgaaaggaggagggggaaccagcaccaacatggggaaagcttctctatgagtcttggtgttgacatcgtctgtgacttaaaccccaattacgtgtaattatggtgaatgctgaatacatacttacaggcttaactagaggactcggccttgagccctgcctccttcccaccctcatccctgtgtttcattcaaggcctggagtcattcacaccagaataggcaccgttacattggtttgacatctgaagctttcagaatgccccaacatgtactgcttggtcagatcttctcattaactcagaaacaggcagagtagatattgttgccattgctacaattatccttcaaaaaaaaaacaaaatcaaaaacaaaaacaaaaagaggaaggtcataagatatgtaaaagttatataataaaatgtagaattagaaagtgggtgtaaataaaatggaacaaaaagaggaaattgggctaccatacagtgctttctacatcctttttttttccctctgtgtaacaagtgcataaaataggcttacttgtgttcttcttttataggtgaactatagctcagggaagattaagactttgttcagagttagtgaaagacaaaccaggagtttgatcttggtctatctgacctcagagttcacaataatctattagtttattaagcaactagggcatattccaaaatttccaatggatacctcaaactgaggataatctagtatctacatattctttcatatatggctaaatgttgcgatgggttctgagagtctcacttatcttcatttcttttcctgttgatgcgataaattatactctgacacatgcaacttaaatgataagtggtttattctgtttcaacagtatagtctagtgttcagaaagtccaagtgtcaggtgcttgaagccatgggtcgcatgacattcacaatcaggaaacagagaatgatgcatacatacgtctggtcaggttactttctttatatagtaacatgatcccagccagggtgggtcttcccactctataacacaaccaggataatccctcataagcatgctcagaagcccatctcccagatgattctagagtctatcaagttaacactaacattgttaatctgttaattatgtcaaattagcacgaatattgtttggtgatcttgtcgctttgtaaatatcatagtatgtatttacaaactgtaatagctctatcaccagacagcatattatgagacccactgcgtatatagtgtgtcattggcagcaacattattatgaggtctttgactgaaatgtgttttgtcctatcaagttgagagttttcacttaaagcacttcagatcttcactttggtgttctataatttttcacttaatattttggattgtaagtaactaagatcatagaaaatgaaactacagataaaatagaagattactgtagtgcacaatatgggatgtgctattgtaaggcatcctcaattggaattcaaggtttctaatcctctgaaatgaggaaattcatctctggatggagaataggagagccttagagtttggggaccttcagggccccacttggctcccttattagtgagttaagagctccactagaaggtgaacttgttcacaaagttgagtacatctgtacacacacacacacacacacacatacacacaaatatatgtggctctgaaatgagatctccctaaactttagttttcccacacagaaaacaaggataataatagctgtcttacagtcttcaatagatgatgctcattaaacaaagcctccctctgtaccagcctttctctgtagcatagcttcgctgttttagccaagccttctattcagtactctataaacttgggacatttggcattacctaaccttcagatccacaagaaggacaaatgagcaaaagaatatcaaggatctggaaaagaagataaagatcatatgatgataaatgtaagagtaggtcagaggacgctttggtgtcatccccaaaactgatggtacctggtaccaaggggaaagtcaagtggacattttggaggagtgggtttcctgtttaaagaatgtagtccaaggtatgtgctatctgagattggatggacacatcatacattctgaagcaagaggagttatctggttggtggactctctgggtcttttatatctctcctatatcctattcaatcaatctcctcatttatatataacacttaagtactcttatggtataacagagcagaaaaggggtcggggagttggagtctattcatcctactgtcaatcatctgttctgaaaagacagctttgctgctgtctgtaacctttagtcccattgaagccagtcctcttgaagcaataaaaataactaagaagttaaagctgtatgatgcttaatgtttaatggccatatacttatcccaattcctcaaagtatatacattacaaatgtaaagctttttctttgttgatcaaactcggtagcatgggtaaaaacaaatgtttcctaattaaaaaaaaaaaaaaagaaagaaaaaacctttcttatgggatttttagtgacagtttcaaaaacatggtctacaaatagttgtggaactgttttaaaaatgaggagttcccaaattagtaaaggagaaacagaatttcgggttagaaacaggaaactgagcccaaagttagaatgaacttatgcatgaattgacaagttttaattccaagtgacaaagttatgtaatgaaagatgtttttctttctttctttccttataatgttcatgttattgaatgcacatggcagaactatttccgagatacctggaacatctttgacttcatcacggtgatcggcagtatcacagaaattatcctgacagatagcaaggtgaatgattcacaagatcgccatagttaagctgtatcctgatgtagtatttaaaaaacaacttctccacatacatctaatcaaacaggtccccttcgtgttggaagtctacttcatccatcctgagcaataatcagagaaaataaacttggggatggtgatagtcctcatagaagcattaggtatatttgcatgactcaaatagaagatatctaatggcatagtgcaaaagaggtgttggaagaaagctaatattgggtgtttggctgaattctccaaagagaaacatagtctttaacctccaagttgttagtccgaaagtgtttccctaaactagttcatcctaaagatcacgtggagagctttattgtaattattgaataccagaacgccattgtgttgaggggcttaggagagtgctctttaggaatctaagtgcagaatttagagtatttggagaaactggggaagccagttttcctcccctgtgtgctggcgtactcctcaaacccatctatctacctaggactcaaggagctcagctgggaggcttagagggagactcactgggtgcccctcaacaggagttaggttaactgcaaaagacagagactgccatctattttgtgatctgaataaggaataaatgcgaaaataccagtgcttagatctttttaaatgagcatattgtcactaattacatgtttccttttggtccaccagctggtgaacaccagtggcttcaatatgagctttctgaagctcttccgagctgcacggctcataaagcttctgagacagggctacaccatccgcatcttactgtggaccttcgtgcagtcctttaaggtaagaggctccccgagggtggagcaccgcatgccagacaacactgcagcggcaccctcaccctggttccttcacttccaggaaggagtttgtaaacttgaagttcattagaagcataaatacaatagttcttgattatagcgcaggctggctggatagtgatcaattcatatctacattacagaatcttattctaaaaaaataatgtatcgctttcactttgtaatctttttttttctcagcactgagacagagatgtgctttatgaattatgtgctgtccttgagtattctaaatctccttgagcaatcctgcccatacatagagtcagcctcccgtcgtcagatgccttcagtgtgttcaggaacttgtcagtgacttaacctcatggaaaagtttttcagaggacttttcaactcatacgtcataaaaaagatgactcatgtacagttcaccatgtcttcagcctgggcatctcttgaactactgaatgaatagtatactaatggcacacacacacacacacacacacacacacacacacacacacaaagtcttataaaagctaggaatgtttgatcaagttattgcaagatagtttcttttaaacattcatatgggactgtgcctatgtccaggcatataaaggtttgttaaaacatagacgcctgaaacccacttcaatgacaatattagtaaagtttccaaacatactttctttgagctctaacaatagcataagttaaatgtctttttgacatttaacaaataacataattagatcactgaggcctgggtgcatttcttttcttgcagacaaagtttttcaattaatatattaaaaataaatttgataaaattgattcaaagatgacaaaccataagttcaacaaattgtcctcccccatttatttatacatttaattaaatttaagagaacaggacagtaaaatcatagcatgtaatcacctgaaaagggagattccttattatattattatatattccaacatatttcctattgatttgtttcagcatcagaatctttgcagtttgagatgaatccgtgactatcatgtccagattccaagatatggcctttgcttttccaccctacccctagcaagaaccaattttttggcagggttattcccacagaggccttaccccaatgaactccagtgttccagggttagaggacagaggaaaagtttaaaaccttacaagtttgccctctgattcttgggtgagttcagatttagaattagagagatggactgcttttaaagctgttttttttttaattttattttaaaagagctgcccatcaggcatcagttgttagtgagtctaagaaataagtgtcatactgtcatgttatcccatcagtgagactctgtgacactgtgtcctattgaagctaaagaaaatgatttcaaaaactgacaaccaaatgggtagcatatttagtggatgttacaagaacgtagtaggcaagtgcatctggatcccagtggggtggtagtctggatgggtgttttatcttcaggacagttctgtgatgctgtacagaagcagattgcctaacaacaaaaaatttaaaggtaaattcacttacgcaaatccaaagcagagagatgttcaatattaatactatatcattgcctttacctactctgacctaatcctaggattcatccagagctgtctcaaccccatgttcagaatgccaaaactcttttctattattttacattagaatgcattttgagaccagaaagaacaggagctaggagaacagatggaatctttggtgttctcccaaggtttggaataggaagatgatcttggactggagactttgggtggcaaagaaagaacaaggccaagccaaatgggtagactaggtcatagagcatcagttcaggcagcagggaacctgcctcctttgccaatccttgtggaaattcagcaaatcctttccttataccctgggactcagtgctttaaggaggaggaggaggagcctcctcattggttttcaggtgcattttaatttgtcctctattgaaatggaaacttaagggttctttggaaggtcagttgttttggagagtgttttgctgggggcaaacacgtgaagaagtgttttcctgaagtgacactggaaaaggatgttttgctaaaacaagcatgtgaaaggatgtgtgatgaaggatccttctattagtggtatgcatgtattggtctgtcttacactgcattgttcagctccatttgtcatgactccatagtaagaaatgcaccaaaaaaactttggtggtgtgctggtggcttcttgttgcttctacagacttagggcagttggcagagtaatgtcagctgatacagactgacacagagatttgctaagacagactcatatgctgagacaagacacgtggtgaggacctgtgaaggacacatgatatttggagggagtataaataggaaccaaaaaagaatgacaaagcatagctctgcaatgcttgttagtctcacatcttcactgatcttcacacacacacacacacacacacacacacacacacacagaggacaaaaaaactctcttggggtccctgttggtcctaattcttcctgctgactcatgcttatttggctgaggcctagctgtctctgctaggtcacagcaccactgctgactcatgtttactatcctggcaataccaaactagactgcggggatatttgtgaagtgtttgctagtggatggagctgccaactgctaaatcctggaaactaaactgctaatttcctggcaatgcaggtgggatttgctccaaaaaacaatttctaaacaggtccacttccccccatatcctaatatcctttctttcccactgcctctggtgagtggtaggctagaagggaggttaaaccatttaaaatccgtcattaaaagtaagttcagaaaaaatttaagcctatactctattcaagttataaatagtccctcttgaggctcttcattttcctaactttgttgataagctctgccctgctccagccatctgaaagcctttgactggtctcctgggactcatggtcatgagtcatgacaagattgagactcacaatggcactggctgcctgggagcttactgaatggtgaagaagagagaacttcatgtcagtacaaggatcactacacaaccatattggtccatcctgctccaaacctcaactgtcttgtatctacccctgccccagaatgtcaagagcaagtccttgccttctattttcataaataaaaatgttatcatcacaaagtggcagtaagcgtacaaaatatagatttttaaatttttgtctcatggattcattacagtttcataatggctgacacttagcaggcattgggggaatttatgtgaaatacaataaaatattgaaaggattaagcactggaaaatggtgtttcatcagaagataaaagatacttctaggaatggataacaaggagcctctagtcatttagctttgcctccagatcccccactatgagttatacattagatgtggggatgagagggagcaatgcagagaccttgaagccaaaacttattcttcttctttaatttgggtcacagttgctaagattattaatcttctacatgtcaagtgaaatgtctctcaaactcagaaagttttgctagccctctttggagataggggtcacatatccatcagaagacttgggagtattttaaaaaaggaaagactactccaaacagaacagctctaaggatcagtgtcagtcctgcttcaaatagcctcagggcaagagcttctatcttgtcaatgtctgcaggagcagtggtctccttgattaattattatctcttgcttcccttgcaggctcttccctacgtctgccttctcattgccatgcttttcttcatctacgccatcattgggatgcaggtgagtggtctgatggggcagcagctgcccacattgtctctggcagagttgaggatttatgtgtgtacagtgtcacttgactaagaaacttctccaccatcttgttgcattatgatcttgggactttcacatgggccaagtggctccctaggtattcagggtggtctgctctgggggattcatctgaggtcttccaattatgctgatgacttagaagtagctaggcttctatgatagaactaaagcaaaatgacatcactgttttcagagagagagggactcgcattgcaactaaagtaaggattgtttctgacgatctctgttatttggacttgaccaaaaagaaggttagatagctgttccccctataagcgatgataccaaatgcatctatattaagttttaactgtctaagttctctaagacttgttactgcccatcctagggagccccagagccatattccaaccaattcctattgtacagggtcgtggaacttgctggataattccctggcctactcatatcctcaaaatttttagaacttgatatcagatcaagttctgtcctagatatttgtgtggctagctagaggttcactgcacctcaagaagaaatgttctttgtaagaacaagaatcaccgggggtagatggcctgcttccataaacaatgagcatgcatcccctaatctatttgatggggtccacgggccttttgattgtctaaagaaggcatcctttctggcttaaggagctgcataactaaaccccctaagaactttatctaacagtccccctgagtcaggaagtctgggtgcctcctcaatggtattggccacctggccaccaggccacctggagccactgcctcagtttccaagccttctgatcaactgtcttgcctagattctttccaaaagacctcttattcaccgttttcctctaactctatggcctgaaggtattctccaaaaccacagctaaatgtccagcatcagaatacataaggcctatggaaaggctgtggttttccttctctgaagatcttacaatccatatgtaaaatggtgtcagtagcattagaaacaattgccacagaacttaacactctcttaataactttaagaacctattaactccctccaaactttaccttagaatttacatagtatcaaaccaaaaattgaaaactggttaaattaaatttagtatgtctaagtttctgtatgataaaatagcttaactctttcatctttaagcaaaataaggtggaatgagactatcttcaagcctactgataagactcatattgatgctaataatgctgtctactccagttacttggtatgccaggtatggtgcttattgtatgcctatatgcaaacatacacatacatacagacatacaaagagaagaggcaaggcatattagtataatcaggagtaattgagcttcattgtttccactgacatttaacatggttaagtagcctttaaccttattcatattctcacataacaagttaaaaagctgatattgaaacctagctgtgcctctttacagcccagttcttagcactgcaccttctttcatcccataagaggagcaaatgcaaggacgtttttgacttgtcagtaggagatggagactgcttttccacaaagacacaaatgctttggccactgtggctttcgctggctattcccagcctagtctgtcacagagagccagaaacatgtacaaattatgcacactccagagtgtgtcactaaaaacaccatatccaatgcagtcatcacaaaacagaaaacttatgatggtttgaatgaaaatgggcccataggtccatagagagtgatactattagaaggtgttgtcttgttggatgaagtgtgttactgtagagatggtctataggcattgaggtgtcaaaagttcaaggcagttcccttcctgctgactgcaatccagatgtagaactctcagctccttctctagtaccacatctgcctcgatatggagtccataatggactaaacctctgaactgtaagttagcccaagttaaatattttcctttataagagttgccaaagttgtgatgtctcctcacagcaacagaaacccaaattaggaaaaaaagttggaatggggtattgctgtgataggcctgaccatgcttttatttggagaaatgtggcctttgtatttgaaaagcatttgaatgctttaagtggggcttaaagggccatcctagtagaacgtggaagaccgtggtattgaggatgatttgaaccatgggaacctgagttaatgggtttcaaaagagaaaaatgttagtatctggccaagagactttttgtgtgtgtgtgatattttggcaaagaatgtgactgctttgtgctctagtccaaaaaagtttgcctggtactaaaatgaagagtttttggattaatttcattggcagaggaaatctcaaaacagcctactattgactctgtcctatggttcttagtattcactcttgtggagatccatagtgaaaagggggatgctgaacaaggaaaaatataaaatgtacaatttgaggagaaaaggggcaccaggaagtggaagggagctaagccctgtgttcaaggagataaagaaaaatagattattaaatagagtacagagagtggtgacctcagggcaatacccacctccaacccctgccagctaaacttcaaaattataagaaggaattaaagaaaagtgaaaaggaattaaagaacagcttaggtccaggtgtggtagcctaggcctttaatcccggcactctggagacagaggcaagtggatctctaagctcaagcccagcctggtctacagagtgagttccaggacagccaaggttaggctacaaaggcaatcatcagaaacagagggctgaagatgtaagagccccacacaaatagaaggtacaatggataggaggagtaagcttttatgtatataaaaggcagccagatggatctataagacaaactgttatactgcacctttaaagtcctttcagaagacaacatctttgcagaacaaataaacaacttgtcccttacaggaaggggtttatatgcactcattgttagaagagatgccattggccttagctcttgtagctctccagcctgtgaactaggttaagctactgagtttctctggccttaggtcctttactatagtagaggaatgggttaaacacaagcagagccctccagtcctgcatttaattccaagtgagagtaggtggaggcctgggctttcctgcaactttcagaagtgacccttcttcctttttcatagcctttggtatgtgggcggtcacaggctaagaggatgttataaacaaaaatgtaaagagattttaagtcctaccacttccatgataaatacccatttgagacttaaaaattatcttagaaaatattcaaagtaccaatgccttccttgacaattacactaacatcatgtgcacaaaattgcagtgcactctccaacaacttcacagagtattttataaaagtcatagccggggcaattaatgatgctaccatgagagtcccagggagaaaaggccctgtgaagtgtacagatgtaatagactgggtacaacttacagacctctagctaagggagtaagaagagagtgaaggaaatttaaagttgttatggatatacaacagtcacctcatgaagtatccaggataaaagaggtttggttgcttcggtggggttttaaaaagtcatgtgtctcttgaggagccatctctttcttatctgttccttctattcttccctctgctgcctgctttgccacctccgttctccccgaagacaagtagtatttgggttttgaaaaaaaaacagcactgagaacaaattcccaaagcaggtgtcagtgggagttacttgagcaaaatagctgggggcagagattgttcctcaattgcacactctcaaaaatgttaggggaaaacgtgctccatttagcacacatcgaataaactgaagcacgctaaatgtaggctgggaatcgtctcagatggatagaagggtggccctttaagttgtcagttgtaccaatgctgccttggaaggattggttctgacctctgaagcacaggtagaggaggagggcacaccattctcattggagcatcttggaattgttgtcagtgtttatctctgtgcgtgcatacatattgctgagtgctgcccctttcctaagaatatcagtgatcagagtccaggagtacattaacaaagcactctctgtctctctgtctgtctctgtttctctctatttttctctctatttctctctctatttccctccccccttctctctgtgtgtgtacattaacaatgcactctctgtctctccgtctgtatctgtttctctctatttctctatttccctcccccccctgtgtgtttgtgtgtatgtgcatgtgccccatcccccactgtagccaggactacctgttttcttttcctttctttctctctactccttcctctttttatgttcctctctggtacaatggattaaaactagaaccccatgtatataagttagggctttgtctccagctcttcttttcgtgtgcccaaatatccttcattcatcctactacccagactttgcttttagcttacacctaagtgacctatttcagtgagatttatgtctgtctggtgatgcatgtgtgtttatttccattggctatgcattcagataacagattctggagactgcaatctctaaatgaaaatatatctaaggaacatacagctgtgtctctcagatctgatcagcttgaatattgatagcttctaccaaaaccataaatgacatccttgtcaactacagatactcccttcataattattagatatgagaaaagaggggtgactgtgtgtcctcttgttaagcaatgcctttggtagattgcataggtaccatgggactaaaatgcatctccaatttaagtgtaggggaggctatgtatatgcagaatgatttaaaagatttacaatctatggactgcttgaacattgctagcattagtcccattgctgtacatagcagtgggggaggtaatgagtttccatatcaggcctagaacatggtgtaagtcagctctctcactccgggttatctgtttcagagaccagcatcaagaagtcagcttccaaactctgacaccattgcatacaccattgcatacactagcaagattttgctaaaaggacccagatatggctgtctcttgtgagactatgccggggcctggcaaacacagaagtggatgctcacagtcagctattggatggatcacagggcccccaatgggaaagctagggaaagtactcaaggagctgaagggatctgcaatcctataggtggaacaataatatgaactaaccagtaccccggagctcttgtctctagctgcatatgaatcagaagatggcctagtcggccatcagtggaaagagaggcccattggtcgtgcaaactttataagcctcagtacaggggaacgccagggccaagaagtgggagtgggtgggtagcagagtgggtgggggagcgtgtgggggacttttgggatagcattggaaatgtaattgaaataaatacctaatttaaaaaaagaagaagaagaagaagtcattacttgtactttatctaccctgcctgtgcgtctactgaccatgtgctggacatgtgatgcaactcaattctgctcattgatttctctcatctcccccaaggtgtttggaaacataaagttagatgaggagagtcacatcaaccggcacaacaacttccggagtttctttgggtccctcatgctgcttttcaggtacctggatgaacaaagactcaaactggagacctcgtggtcttcagctgccaaggtggggagaagcccctggatggagaatcctgactaggctcttgatctcttgattctgcactgctgttcttgttaggatatgcagtggaagtttgccttaatcaaactttcccgtgatttagaaagtttcaccactatctttgactcagtagttaatctgtgtatttcaacttgtcctctgggatggacacagcttcttatgggaacaatttaagacctgaaaccttgagtagctgtgtttaggtggagtcttggggttccaccactatcagattagacccttaacagatggagacatggtgggcgaggaggaagaacaaggaaagggtctcatgggcattcttctccatgtggaaggtattaaaagggcctcactgggttaagaaaaagtcctatgtgtgaataggatagcagcccaaggtaggatgggacataaagacttctaaccaagatggatttctgtgttcaggagtgccacgggggaggcttggcaggagattatgctgtcctgtctcggtgagaagggttgtgagcctgacaccactgcaccctcagggcagaatgagagtgagcgctgtggcactgacctggcctacgtttattttgtctccttcatcttcttctgctccttcctggtgagtaagaattttcctttctttgaggcatgcctggtaaagtgaaggctcctatagtgtgtgcacacattctcccctgcctcttagctcccttgttcctgatccctcacatacacactcacactccaagctatagaagaattagatcattgcctttggggaccaaagtgctccttggaatccttgcagggagggtgactcttattggttgagatctttgtgccttcaagaagagagtccttgtgagactggataaggatttgaacataggaagagagcaccaaacttcgtgttgtctctggagctactggagtaacccctgtcttctttgtgccccgtgtagtttatttaatagctaggacttgcatctgtttgggagattctgttttatttttaactgtttatgaaaaggtaccttgaaaatataagcttatagggttcatcagaggcaaataatgatcgcatgcagtgtaattggtgtgattctctcctgactatggtgcaacggaattggacggcagctggcaagcattctggtgtgaaaacgtgattactttgggtgttagtgaatattgaggagtatatgtagaacattcccacttagggaagtggtaagagatctgaaatgccctcttagttccttcttttggagagaacatctagaaatgtcttccccacacatcagattagcagtgatggatggaataaatacataaggtgtcaccagatcaatgaaaaggtcactgtagtccttctggctcccataatgtccctgagctcaacttcactgcaaatgccactggctgtacaaaactatataacactaaaatatcgctgctgctgctgctgctgctcaaaagtaggaccattcactgaaaagtaacttaactgtttcatggccaggccatttctctgaggggacagagacatgtgacaattcagctttctggtgatagcatgggccctgaagataggccattctgcctggtacataggttaatgtagggtgtaaagggactctgggagtcccctccccccttttggttttggctttgttgtcatttagtctaggctaaggcgcttgctcttatatagtgtcttttaaatggtatagacatgtcaggaaagagctgggaaggtagctcagtggaaaatggtatttgctgtgcaaaaaagaaagctgtgtgtagcttcccacttacctataactccactgctgtgggagggttggggaaattggtgggggcatggagacaggatttctggggcttgctcaccaccaattcagctccaagttcagtgagaaaacctgtctcaagggaataaagcaaaatgtgatagtgcaaggccctcagtatcctgacgtggtctctgtgtgtggatacataccattcaagcactcacacaaacacatgtgtacttatggcatactcatgtgcatgagtatctgcacacacatatacatggtataccttatgcttgacagcagtagtattaagcacagtgaaataatgcatacattttgatatatttcttttctatgggcgtgaaactttttttttcaatgaaaaagaacacaggactgtttataaatctgaaagcacaatgtataataaaaataactgaaaggaagttaatccattcacatcttcagcccatttttatcaagtggctactaatgactggcactaagctaggcaccagagtagaactgtcagcaagacatagtctctttgtgagctccagtaagaaaccaatatacagaagaattaacacttatcaataagaataaatcaaaacagaaagggacacatagacctctccattttaccttatatagtttaaatgtttgatgataaatatttaaaagaaaccagagacaaaagtgaaaaattaattagaggctgtacggtcacttttagaattgtgagacggagagtgctacataattcacattaatgttatttttaatgaggctatattcagtgtgagatgacttgccttcatgtctcagtcctacaataagactaactttgtgacctcgggccagtcacacactgcttatttcaaatcaaccatccaacagagatttctgaggcccttggatgtgccagaccatgtgctaaaagctaagaatgcagttgtaaatcagaagcatctattttctcaaagagctgatgggaattaaaacttcctcctgaagggctgaaaggagcatgaaaaccaatagtagatgttaatgtgtgcagcacactgctaaaggatgcaagaatatgaagcattagcaatgctaatagtttttattaacattagctattaacattaatgattagtgccccgaaaggagtatgcatataaacagacaacactcataatccaggcagtggctgaataaaatctcaatgacagagggctgtgttgggttcagctatatgaaacagcagttctcaaacagcacctgaaacaggagggaccaggttttctttgccatgttagtgaagtctgaaggaagccatcgtgcttgttatgatggcctgacactggatcatttctgtaccaactgatgaatgtccttcaccctaacgtgcagaaaagacaagtcaaccttcagtcatccatttgtaaaacaggcagtggtaaaaagggaccatggctgttaggatatatccaaccttctccatgttgcaaagactataggaattatgtagactttcttgtagactttctctgtagcctatattctctgcctgcatatttgacaagcccatgaacccaaccacttaaaacaaatttttctatcaggtgggaatcttgaattttaagtgtaagaaagcctagctagatatagcataaacaaaatgggattttataagcacctgtcattggggtatcctagggcaaggcaagcaccaagataaattttaattccccttttcatccttctctattcataaatctttccctttatgtgagctccttcttcaaatacccctatctgatgtcaggcagctggagtagcaactccagaccttacatcttctcatgtccaagagtaatagagatggccatgtcttttgcccaatgcctcttcattggcttttgttgaatccccactcatattgagctagagaaaaataggattcaatgactgggtaaagcttaggtcacagtatgatgccttattgaactatagtactaggccaggccagggcctgtactaggagtaatcagtggcatgccagaagcacaacagaactgtttactggtctattcttgtctttggtactgtcattgtgaatgagtaggcccaggagcacaccattctcaccctggttctatacctaccttctataccattaccaaggttatctccaaagacaaatagctcttggcttgcctacagagtagtatgtactacagatgagcagaccctctagcccatgggctaatctgatttgctacctggttttatatggtccatgaactatgaattttacagtcttaaaggagggagagacaaacaagagatgaataatattctcatggcatgtggaaattatatgaaattcaaattccagcatccataaacaaagcttccttggaactcagccatgctcattgatatttctaatgtgtgtggctgtttggggtggtggaataccagagctgaatagctcagacagacacagaacagcccatgaaacatacaagaatgtctggctagttggctggttttggttcagaccagagcatggtaacacgatgctttggtcatttggtacttggccctggatgttttactctacttaaggacccctagaatgtccctgttcctacatatctctgttaacattcatgctgcaccctctgcgtaaggcactgtcttctgcgcttatgtgatctggtaagtatgacctgccccatcgtgcttcagttcaaaaacctagtgacttctacaaagtttttttagctactagaaattccctttatagaattttctgtctctattgtcacttgtatatgatgctctcatggctgctgtgatttgcaacctttttctgtttccaatatatcactgtcttttctaaatactagataagttttcaagagtagtcatacagcaagatctagtgaaggcctgctttgcactgtgctaggcgtgagggtctagctctagactagcactttctgacctcatatcctagcacctccagaaacagagtcgctgagtttgacacatactgggtacgtagtggagaacagacccatggacagcttcgcacagggagcatgctctttagctctgtggcactcattgtgctctctggggactctattttcataaagcaggatgaggatggaagctggcgagacaatgttgttatctggccttgactttctctagcctttaagaatgtggaaagcactgttccctctgctacaagaacaattaagtaagtcaaacaggtaatgacagcagataacgtattgtgcgaatgaaaagcagcataaaaaaaaagaataaactcatagtgcccacacaatgagatgcacggtctgagtaacaaaagtgagttgcatttagcaagctttgcctaggaactttgccttggagcctgtccatctgtttcctgagctctgccttaatttcctcctaactcttctctttctttgccctccagatgctcaacctgttcgtggctgtcatcatggacaactttgagtacctgactcgagattcctccatcctggggcctcaccacttagatgagtttgtccgtgtctgggcagaatatgacagagcagcatggtgcgtaggccttttggccactcagaaattaggggcttctagattgctcaaatacttgcctgttataaaagggaaggaaacacctcttggttatagctcacggaagaggcactggtctcaggccattcacccaaatcttctctccctgggccttctgcacccctctttctttttgtggcagactgtgcccttgtttgccaatttcattatactctagattgactacacaaccaggggagcttccaacctgctcccttttttgctatgagtcaccggggactcagataggaggtttcgggccaatgggacatatctggccaccatggttagtggcattagtgcttttcttcctcattcttttcagcatatatagttaaataaaacactggtataatatttcaaataatcaagtaggtggtcctgccaatagatgccctctagacttgtgggcttttatcacatgaaactgagttaaatggcaggagctggcagggctgacctctttgctgtctttcactgtccaatagttccgatgtgatgtgacatctagactttagagcggggatcagcaaattaccacctgtcagttaagtttggctcactgcttttacaaatgagtttttatagaggtacagttacagccatttgtcttctctattgtctatggctgtgcttgcactagagtgaaaaactgaataactgggacaaaggtggtctgaccttccagttcaaaatatttactattaaactattgccaaaaccttcactctttaaaaaaaaagtcttttgacccctgtttcaggaacaatgacagtgtttttagcccttgctgatgaggacagtatgacattctatgaatgaaaagctttgctggcccaggcaaacttagcttctgggtcttcactccccactctccccattctggtccctctctgaaaatacttgaggaaatgctcttcttcacaggagtggaccaccgttgcttccacctgatactcccttcatgatgtgtgattcttccccatatctaccatctgtgaagctgctaaacctgggttaactgttgacagggtggatgggtgaattagaattcctttctcttctgtaataatgatctaggccatggggagatgtagatcccttcctgatatagcagctaagcaacagatttttcttgctgtactcagtttccaacaaaaagttttagtatgcaaccggcgatggcttggaggacaatgatgctcagcctaaatcttagccattttctcactttggacaagtgatgtaaccatctatcaagtggtggtaatgatacctacctagcctggtgtgtgtttgtgagcatgtaactatatcatgcatactactgttaggtacttgacaacatggtatgtgaatgcaactcagaaatgaggagaattgccatctgtaaagcatttatggccttgattttggatgcctattcactcacgtaactgaagagacactatctgctaccaaaggatggcatcacacatctagcctcactcggacatccttggctcttggaaccagcacttcctttggttttatttcctctgtggctctaagtgccaaatgccttaaagatgcccccacttcattgcagttgctgggaagaggctgcaacaggactaatcatgaaacttggtcacatgaactgagaaggaaaaacagagaggaactccttctgtcatttcgaatgtctagagaattaccaattattctggttacatcttaattggttttctcaatggaataaggttgttgagaagaaaccagcaaacgtgcaatgagtcagggtcttcatataaagaagcaatgagttgaaagccactacttactactcttaagtaaaaataaactgacacatgactactttccatcattccaaggggcaagagactgggcatgccggtgagctactgtctggaaagaaacaagacaaatcagcaccgagtcaggaaaaggctagaaagagtgaagctgaagaaaacatttgctttgataacgcttcctaaaaggatgcttagatggagatagtgtgctcatcgtttctatggcaacccccggcctggtccagggtgcatactgactttcagatcccaccatggcttccttgttctggtccctgacagggaagatgttttaaccactgagaattaatcctatgccagttattccatttccacaagaagccagaagtctcttgaaggttcctggaagaaaaggttatcaaaaaagggtcacagtgttcctggaattctgcaggatcaatctagaccctgagtggctggaatggagctgcagggaaatatttctagggcatctttccagattgtttttggacacgaatcccagtaggctcctgtggaatagagcagcgtttacccaagctgaactcagtatatgtcacagagagatccaaagccctttcaaattctctcacgcaaactctgtttcttgctaattagcctagtgggaaatttgtctctcacagtctacagaaacatgctgactccccactgcccctgacaggtggcccgtagtaactgcctgtaatcagtatgggtgtgaaagcaaagagttctgtagtccacacgttggcaacctgacatctgctctggacagtggccagagacacactggctgtctttttgctcttagaagcctagctggagcttgggctcctcaggccaggagtgagccacacaggtatttctgggtaccttaggcattaggttcctttggatattagatggactcggatttcctgagaaaattgggagaatagtttggcaaggtggtaggtagttctctggttctcatcactctggtctgattatgtcaggcaccaataaactggccttacctctttgggacagtccctgtagggagaagccatcgtttcttccccattcttttctgagtatcttattaacccacctgtgctttctttccagcggcaggatcccgtataaggatatgtacaaattagtgcgggtgatctcgcctcctctgggcctgggagagaactgcccctacagggtggcttgcaaggtttgcccccccagtccccagccatgacctgcagtgggatgcagcatctaaccctctccgccctctgctccaccaccactgcgccacatgagagaaccttcatgttgcttacctttgagtttaaagaggcccaacccctcccagaaccagcagctgccgtataggaagaagggccattttatggtgaaggcaaaagagagttaaagacttaatacaaaggccactagagtcactccttttggcttttcccacaaatatactgttgtgcacctacacatacatcccccagtttaccctagcttgtacattctaccaaaggacttcccccttctctgggatgcagaaatcctctaatcaagcaaaagggttctgatttcccttcacgagaccttcattttcattgaaccacatgatttcagtgaacctagtcatccctacccctgctatccctcacagatcctgggtgctttttccaagatcagcaatagaagctgtaggacagaggggaagagggcaacaggtaaacatggtttaaaaagcatagaactattagagaatttcatagcacagagactaaaataacctcaacagacacagaaggaccttgaactgattatttaatgcctttggtgcctgccagtcacacttgtaagaggtctgccgtaattgccaagtcactacttcttggttagaccaacaggttccgagatataagttcaaactctgcattacccaggatatacagtatcctagtcgctttcccaagcccaggaccgctaaatatgaaccctgcttcaggtgctatgggaggaaagcaaagcaaagagctgctcaggcagcagaagatacaggctcaggaaggatgtctgcctaggtgatggatggagctgacttgggatggtgaccctgattctgaactcaggaggctgaacagctgcctctgctgagactctttaaactccaccccagtgaaacctgcagccgcatgtgggagagctggggagggtagcatggcatgcaagatgctcttcttcctcctggttttgtttcttctgtccccagcatgccatcaacctggtgcatgctggggaataaagagcactcttgttcacggagccaggtggaagcaacggggcgactttctgaccagcaatctcagcccatcactttcaacgcaaacggccgccgcctcctgctgcacacataccacagaggggggatacacgacgttctgcctgtgggttcagggcaggggacaggcctgacttctaggccagcatcccagccccagtaggggccagaaactcctacccacggctggagcaccgtctatccggtttataccgctcacgcacagccctgggaattgaagacatgcttgtgttactttggggttagatgcagtgaaccacaaagccagcccagcactaactgaggaggagaaagtgagccccgccctcgacccctgtcagcaccttctgactgtgtcagagggaccagaggttgtaactagtgttcccgggtctgtgtggggcgtgatataaatctgcaccaggacggagtcacttgtatgatttgccttgattaacaggtctcctgttcttttcctgtttgtccattttgtttgtttttcttctgtttcttgtattactttgttttggctctctgggaatgctgttcctctctcctacttgtctgcatcctttcccccacccccacccccttttcctgtccctgccaccccctcctgccccgcccatgtcctgcccctactcaccacccccatgagcagtggccgcatccattacactgagatgtatgaaatgctgactctcatgtcaccaccgctaggcctcggcaagagatgtccctccaaagtggcctataaggtagacaaccccttcctttgttctgggctagagaccaacaggaaatgggatccagttgtggggaggacatactctgggaggaagctgggttgggggggcgcggagatgggaagtgaggattcaggagtcaggaaggttcatgagatggagtcataaaggatacaggagtggttctcgtgctgttcaccgtggaccttttatcatgttactgtgttcctactcgtgtgtggcttcttgtgagtgggctactagaaaggtgctgctaagtggcgtgtatcctttgaaaggaggcagagtggtggccggggaatagttggattggcaagaaggaaacctatcaccaaaaaggctgagagaaaaaaaaaaatatggcttcactcataaattaggaaaataatggagcaatcgttaaggattgttctagaagaaatttttagaagggaaacttgtaataaatttcttcccctgtgacgtaggaaggagcaacagcatagcttcctgacacaaacacaaaagaagaacatgtcttcaagcattttacaactgacaggaacgtagctttccttccccagtggccttaaagagggcaacaacaggcagatttgttcagttagctttgccttcttagcatgaccaagtggtgggtagatttcttgaggtcatacaccagcattgtccactgggcgtcgtcatttggatgctcccagcttcggggccgggcattttcttcacctatcagtactagttactgttaactcccttgtgtatagactggcccagaactactcaggggctttctcattcgcctaagcacacatcatagcaaggttgccactaccacagaagtaagaatgatgggactcagatacaaacaaagaaacaacctttacactctagcacatctgtctgtagagttgctgttggcaagatgatctatttgagtaatagaggtgtggcttgtgaacaacaggttccaatcactaccaaccacaaccaccaggataaaggttctgccagaggcccttctgctgccacctccaaatagtcttgctccagagagtatcttactggaatgtagtccgtaggaaccctcatccccaagtgcatggctccttatacacagcagatgcgataatatctttctctgatagccacaagtatcacacagtggggaaagaattcctgggatgaggccctgatagaatgaactgggagaggaatgggaggagagtctcacggattcctaaagcaagatactctctgaaagtggatttggccatttcagttggatcccttcctctgggtgaggggaacagggcctgcccactctgctcctgcctgcacctccttctctgactgtcttccctgcgctcctcctcctcgtcctcctcgagcctgtttgcactctcccctgcccattctgctcctcctcaccccttcgataagttggactctctgcatgttcaatcgtgtgctggcaaattccatctttgaaagacttaaaaagggggcaccaggatacatctttcaagtgagatgaacagagccaagtctcttccccatctttccattgaccttgggggtgtttgtgggaacaagtagaaaacagagagcacctctgtagcagggagtggagccacctctcagagctgactctgttccctaagggacttcttgaactcccttcccatctctctgggagatattcctagtactccccatgggaaggggttgtaaagaatgattagctaacctcctttccttggcatttggcatcagtccctagataaaataaccacaaatgagctttagtgagaagctgggagagccggactggcatggggatggggaatccttgcccttcttttctgtctctgcatttaacctctgcactttccttccccttttatttttaaaccaaggtgtctttcaatatatttggtttttgcctgctctttctcttttctctttcacacagaggctggtcctgatgaacatgccagtggctgaggacatgacagtccacttcacctccacacttatggctctgatccggacagctctggacattaaaatcgccaaaggtcagattagtaggggaagggaagagggttgcaccctatgttatatcctgtgcagcctgctataggatggagtcatctgaactacttcccagccagccatgctcctgataaggccgtgacctggttttacctctgacttagtaatttgaagacttgtccttactttggtaaaaataaatgacttgctattccatgcctgacatgtcttagcattctagaaatatttgttgagcatagaaattttaattctgtaattttttccataaagcatcgtttctccaaagtcttgggacttaggaagcatctgtagcaggtgccaacagagtggacacccatcatgattgctattcagaggtctgggggagaaacggtctgtggcatctgtacagacctttagcctgccttctcctgcctttttaaagaatcaggtcccttaggctgtatggtcagggtcagtggaaggaatgatgtgtattgatgaagcatgagttttccttatggatgtcttcatttccctctctgatgtactgagcacccaggaggctgttagaatcagtgaggaagttgatcttggtctcagcctcagatttctggggaagaatatgcctgagtcactgaaaataggagccaaagcgtcttctgcttcctcagcaaaaatgctggtgttgccagatcctctgtcacttggtgcgagatttcctctcattatgtgaggtgccatgctgattcagctcctgcccccacccactcctcagtcttggtcgtcattattctgtgcctgttctgattgggttattaataatttatcttattctaggtggtgcagacagacagcagctagactcggagctgcaaaaagagaccctggccatttggcctcacctgtcccaaaagatgttggatctgcttgtgcccatgcccaaaggtgtggtggctcctccttccaagtgtgcttgtcaccgtggcccagcatgccaaggccacatcttttagggaaaccagcgtgatcaaggcgataagggagggttgctcctttaccattagaaacctaagtccccacttctacagtacttttattcataattaattaaaactaactttttaagacaggtcattacttttgtgaatgaaatttctctgggaacatagctctcttcctccgcagaagactgttcagtaaccccttgtgcatttgtgttgctacttagacacgagtatctgggatgacaggaggccgtgctcactgatgtctttcttactatctggtcctgtgagcactgccttttttgcatggatccattcgctttgtgtccttggagctttaataaatagatgtgtgagtgacttagagcacgaagctgctttggagagtggacacatatggccatctgtatcctccctgtttattcccatgctccacttgtgcttctagcctctgacctgactgtgggcaagatctatgcagcaatgatgatcatggactactataaacagagtaaggtaaagaaacagagacagcagctggaagaacaggtaagcaccattgaaagcacattggatgggtcatgagtagacatggatttccagagggcaggttgcatgtatccctacaatgtaccctaaaaaggtggaaggggttttggagttcaagaactttcaaatgaggtgggattagaaacctggggaactgaaaggttaaaatagtcgagcaaagaatcagtcatctttctttgtctctcatgtaagttgtggtgtttttcatagtagtcctcacaaagtcacaggaattctttgtctccactcagaaaaatgcacccatgttccagcgcatggagccctcatcactgcctcaggagatcattgctaatgccaaagccctgccttatctccagcaggaccctgtttctggcctgtgagtaaaaaccacatgaagggtctgtgggacgcctgtttgcattctgccaccatggttcaggcccgggaatcatactctgagccagttccttcctgaggctgactgtctcaaaatggcttgtcagcaggagtaagagaagaaatgagccaggcatgtgtgatgccgcaactggtatcagaggcagtagatgcagcagaaggttggtagcaaaaggtgctgactcacgttataatgcactaacaccttagctatagttctgttggggagaattagcataatctcaagggtttagttgtcttctcacaatggatctggcagcatggatgtagagattgctgagcagaagggggaaagagaagcaaccgtcactggattctttgctcctggggatgacagttgtagcaatacagtttgcttagctctcttgattctgccataccctggagatgtatatattgctatcactacttttcaaatgaacagacagggactatgactgagaggaggcagcacctaggttttcaaatcagtcatttctgattctagaggctttctactatatcttagactctggaatgaccaaaaagaccttataaatggaaagaaaaaaaaatcagaccctgaatggaagaatggtctagtgtttctaaggcttacctactggttgactgttagtcagagatggtctctcatagcatacatatcccagtatgtcattgttttccagttgtcaccgagcggggagtggaagccaagggacacatgctcctcttctcattggaaatgaagttatgtggttgggtttaagcaggtcttgcttggagaagtgggaatcactaagaaggacaattccactaatgatcagaaaagggagacccagagtttgggaatgaggcctccattggagcactactgggaggagtccataccattcatttctttcacactgtggtatgaaactttgttcttgcaaatctttttctgacttcataatctaagaaatttcaaagagaagaacatgcccagagctttctttacaaacaattttgtatgatcagagaacagtctttggctactctgggccccagaaaacaagtagaaatacattttattgctctgtggagtagagagagagaaggtatgactagagaaatggggtctcctccctgcaaggcttcacactattttttcatgagtccttgatctattagtggaagatactcctttgcccttgcatctatatctctgttttgtctagaacgtctacataagccaagccacaccatgggatcatcactctgaattttcttccatatgttaatagattcaagctgctcactgatttttaccaatatttgttgagaacaaattttgcctaagcattggctctggcactagagatactgatgatcaggtcatagtccccagggatacaaatctggagaggggaaactataagaatgatagattaaatgtgggaaggcaggacattgtgatatcatggaaaggaagctacttttctcatttgagatcttggtgttgggtgggaagggtgtatcctcaagtaagaaacatagagacccaagggcaagttcttcaggaggtaaactgaggtaaactaaggtacctatggactacaattggagtagaacatctaggaaaggtggctgctgccatgtttggagagctgcacagtgacaatcttagagggcattctaagccacgatcaagaagttaaatttattttgtcttaaaataatggggctttatgtttcagagtgacattattagatttgtgccttgtaaaattcatttatgaattcaatgtagatttactggatcagaagagaacattctagggaaaatttctagagatgatatcatgtagtagcttgctgaggttatataaattttcggtggcagtggtttgaacaagcaggctagaaatggcgagaagtcagtaagcaggatatttaatagggagaatggataggatttagaaataggtttgctatgaggagtaaggaagggaaaggaatcaagaagagccttgtgcttcaagtgagagcctttgggtggacagtgctacaggcttgagagccaggccctaatttagagagtgctttagggttacagtggtgaccacaggaggcagagctcactcaccacacatacaccaagtgaccttacaaccagagattcaggcctcaaatgggaaaactggcagagaaaggagtcatggtttccaagtacgattgtgataaattccagcaagaaaaacagtggcacgagaggggggcatgcaagagttctcacagagatcaagactattttctgaaggaaataacttttggtacaatgcctccaaagtatatggaaagagtttggtggaaagcagatgtagcctggctgttactacattcagcacacttaaaacagcatatatgtggaattctgggagcaaaggacaggaatgccaaaggaggttggtgaggtaggaacaagagcataggagaggccattttttaaagaaggttatcactctgagttgaaattatttatccttggagttgtttagcgattctcagggtcctgtcaatatataaagaatagaatttatatttataaataataaataatgctggatcttgggaagccccaaagtgtggtgccttgtgtgatgagggccttttagttttatcaaattgttgagaagaaatggaatagccttgttaacagggacctttgtctttttgtgatggagacagtgagagtaatgtaccatgagagccccacctccacagcctcctcagtcctaattatcttctgaatggcctactttcatataactttagtaatgggatttcctgcacatgaactctgaggacaccataggaggtcttcaccaccgaataaagagttaactgttctctctagaactcatggggccatgtgctgtacttgcaatgtacctcctgttccctcgattttcaggagaaggcacatatatgaatgaatgaataaaatgaatgaatgaatgaatgaatgaatgaactttagacaggtaatgtcaatatgaatgactctgtgggagttgtaaaactcttacactctcacagtcatggtgaccctccaacccccagttgattctcttctatccaaaccttctctttcaaggctaaatctagtatgattctacagacagattattttaaaataagtagcaattcttgttcactcctctaatttcctatggggtgcagacttcagcagtagactgttatgagaaaggcctccctagagagaaggctgacatttggagagatggtgtgtcatcttgtaggactatgacttttcagagagtagagcttcatagccctggcctcttccccctttccccagagtcagggagggcttgcttatattcttgcttaggccaaagaaaactgctaccatattggtagcagtgagtggcaacagaagccaatgtttcaggaagggtcatctggccttttcttctaaccaacaccatggatatgattgtataggaattgctgaaccaaactgacttggtggtgatctaccaggccaacccccatatatttcactcggcagtgtttttccctacctcatcattttctcacacatcgcaagcaatacagcaatacaggggctttgcttccctctaaagtcatctttcagttcatgaaccaacaatgacagtgaacagcacagagaaaccctttaggaaatgttcatggagctgaattggatagagttgagcttagccatggatgctggcacagtcaaaccattttaaagactatgactgcttaatatttaaacaagctgttcactgtttaaactctggcatttttctgcccaatgagggaaactcaacagaaacaggtttacaatctagcactggtcttccatatggctgagtgtgacaaatgatgtcatttgtcacagatatgctggtcgccagcagaatgatgaatgattccaaatgcaggttgaaaacaccagtttctatgttttcttacgctttcttaaacatcttctgttctaagaccagccacctgcaaatcaacagatttatagaccagccaagagtgcagggtgcgactctcgtatggaggaagtcttctatgggatgggacttgctagtggaagttgtggcatgactttttctctgtccctcattacctctgaatttgacattgcttttcaggagtggtcggagtggatacccttcaatgagtccactctcccctcaagaaatattccagttggcttgtatggacccagcggatgatggacaattccaggaacaacaatctctggtgaatgcacaagtacatgacctcagaagcatttccttggtctcctgatccctttcagcctatcttcagccccttcttacctagtttctcatgtttactgagaatgtttcctcttaaggttttaaaagtaccagagggctcttctctcctgtggggacttacatttcttcaggtcaaacccttttcatttaccaaattttgaagcaaatataaaaaaatcttgcctgtgatagtaagctttaagacagtctgatataatgagtggtatctatgcatattgtatgctgtactactgagtgttgcttatgggaatatgagaatgtccctagtatccttgagtgaagcccacctcctctaatacatagtgtttgcatctgcaacaatgactagctgcctgacagaatatatggaagacttcaccacttttgttatatgtgggctcaggcaaatttcttcccttcagttataattttacaatgtcacatacattccaaaaagcccctaacatcattttcctgaccccaagataagtttttcattagtctggatggtaaaatttctgagaaccctaaagtcaagttcagccttggagaagagagcaccagttaaaaattttggctttactagtgcaaaagcaaaaactgattgccaaactaatcaattttgcaattattcctagcttgggagttgtgagttccaagtttcctcccaggcctaattggattggatagaacaagacaaaacctagtttttgcaattgtctatacagtcagccggcattaagtgagctgagcctcattcctttaacatttattggtgacctttttcctctcagttgtctcatgaccttatatatatcccagaaccatgccaaatggatgatgatgatgatgatttgatgatgatgatgatggggtgtgtgtgtgtgtgtgtgtgtgtgtgcgcgcacgcacatttgtgtgataaagtagcttctctacagagaggagtaactcagctgggtaattctgtcttctgtgcttgctgagacagaggatcatgcatagttgtaatggaaagatggcaaggtcagatatccctggaatactgaacaacctacccaaggatgttcttggtagagtgggtagggcttctgacaataattgccctcttcccctaactgatttagcactaaaatctaggaacttggttgatatggatagcttgattctgaaaattcttctcagttctttatgccttgccaaccgagttggtaggtgtggtagagaaaaatctcaataatgtgtcttttccccactcccagggatgcttggctaccgcatcacttctgtgggtttccccaggctgagacgtagcaccagaacttttcggatatgtgttcatcttgtcagtgccggtgtctgtaatttaattcaggtgtcagccatgaaacaccctcaccactgtctactgcccatccctctgggtccctgctccatgtcctgaggcgtggccatgatttgtgtatgtgcatatggagtgtgtctcacaccgcctctgacacctgtagacttcaatgtcattgctgcatctgtttgaagttggaattgtgtgccacattatcgcacgcactacaaatgctgtggcctcctcaagtgcacatatcacagggcccgggaaggtcctcttcccagccacaccagtagccataaagttgaccagccatcccaggttcccctttctttgaacactgacctactcatgcacccatattttagggtataaatagctaagtataaaatgacatttttttttcttagaataatctccagatgtcaaagatatttctttgatctctgtgtggcttatgtaagtagctccaagatttatacaattatacaagttgtcttcatggtaactcacattcttgaactaggaaaataacacaggagtttcagaagtaacattttccttactaacctcataacactttgtgggggcacagttaatacagtaacatcagtaacacatataagactggtgaacaattggaatgttatgagtccaaatgacatgtaatcattattcttaaaatggggtaatctacatgttgacatgataatacttgggtatattaagttaaataaaaatgtgtaatagaatttttttaatgatcacatatttaatcataaaagcagtttgcattatatttatggttagtacatttctgacagatggttacccactacatttttggatggctttaattataaaactcttacctaataaactcataacatattttctcttagataattagcaactttctttcaaatcctggtttctatgaaactgataaaaaacgattcttcaaagaataaacacagtaataacacccatcagaagatatatttcacacatgtaaagtatccaatgagcataaatgtttgcttgataaggctataaaaccctgaggagttcttccaaagacagtctttacctcttcatcccattgagaggcttctgtgtgcgatttctagcatcacacatataaaattatgcatgtgtgctcatataacacacctacaactagggcctcataaatatcaggctcccttctaaaagccatttctacaatgggggctgaaccatcccctggaattgagaggcaaccagatggaaccaagtcccacaagcgtggctgtgtgtttatttccaggagccagaggttagtgaattaaaaagtgtgcagtcctctaaccatggcatctaccttcctccggacacccaggagcatgcgggatctgggagggcatcctctatgccacgtctgactatggatccccaggtaaaactcagacaccacacaccttatgcagtgacatcccaggctttattaggtgggttatgaaatacctgatattttcaggtaagccctgagctttcctctaccccttaactacacacaagacctagctcatggaccatctctgaaaaagttttctctatattgtgtttttaattaatcttgccttcaagtgtctactcaacaacatagcatctcttttcctgccctgggataagcattctcaggacccaatcaaccaagcagcaggcatttttctctctgtattttcccatccttttctcttttcccagccaccttggtacatgagttatctgtacacaccgctctatgtcaggactgtcgtatccagtgcaggccacgcctcatctctttgtctgttttcttagcttctttgtctgtcttacatcaagttttgacagagacaagaagtttttgtggatctgttctaatacctgtgacaatccaaagcaccagagtttgtggggctaggatggtgggggcatagtgatggcaggaaggtagtacttccttagtggttgggttgcaagcttgcctagggtaggaagctctaagtaagagccttatctgctaagtaagaaatgtttccctcaaaatatagccttttagataattgctgtcacctatttcaaagtgaccccccccccatttacagcaggtcctgactgagcacctgtggtagatagttctatgaggcatttacacagtgcctgcccacactgcacagtaagtagaatcatctggttttattcataaaaacaaggagacaatccaagccactctcagtgatggttagcttacataggacaccttttcctgattagcctctgcagccaaggtttctgcaagggggattcaagggaggtgacaatttccagggattatagctcaccattcccaagagtttcagtaccgcatctggatcttcagactctttcagtgattaatccagactttgtattcctctggggggggtttcctttctaggtggtaacagaccctagctctatgcgacgttcattttctacaattcgggataagcgttcaaattcctcctggttggaggagttctccatggaacgcagcagtgaaaacacttacaagtcgcggcgcagaagttaccattcctccctgaggctgtcagcacaccgcctgaattctgactctggtgagagagtcatttttagcatgtgtctgttttcctggcaactgatggacctagtctttataaggatcagtagtgactagaacatgatttagataaagtggagcatgatttagataaagaccagggtttaagaaagcgaagaaaggcctgggtagatggttcatgtgtaaagagcttgctgtgcaagtgtgaagacatgggttcaaatccctagaacttacgtaaaactggagcacaacagtacatatctgtaatctcagtgttcctctgacaagatggatcctgctattctggtttatgcagccgttgtcactaaagtggtacggtctcaaacatggcagcacaaaactaacaccaagtcctctgacctccacatacacactctggctcacctatgctaacccacctatatgcaaactgaaagacaaatgctccagccaaaatgctgctctctctgaggtatcattcggaaactgacccatgccctgtgtggtcatcacaagtgccaatgctattcaccaaggttttcagttagccttttacaaaacaacagagattccataggaatgtcatggaagccactgcatccccaaaaggcactgagctctgccagcagctcgttttacccactgtgttacctggaattgtcccatgcactgaggttcatttaaagccttcctgttttactggttttgaaaactttaaaaatcactcatctcattccgcttacttcactagaggcagaaatcaaacttgaaaaccagtgatcttccccaaattgagagccaggatgtggcgtcataaagactagaatggagatccttcaagttagatccataggttctcaccctaacattacattagatgtgctagcatttcgttcattgaaccctccaaatccccttccttgtgccatcttcttaagtcaagtgctggacacagacaatccctgagccatctggcagagatactgtttactgtatctggcataaaggaagcagagaaaacagttgccactcgttgatacctgtcttttcagtggtacctggcagactcacttgctcactaaaagtggaattttctacctttttctgtcccatttcccttttatgtcacctgttgatctgcctggagaagccagggcacttcagtcagttcaggaggccatgaaatatgagctcaatgggacaacagtgtctggtggggacttcctcttctcatcatgtcctcacaggagagataacagggacaggaagcaaactatctctgggatacttattctaatagtaagagcttcaccgtcctaagatagtcacttaccaaaggctgtacatcctctctccattccactggaggttagaattcaacactgaattctgaacaaacacaatcagttcacaatggctcaaatccctggttagggtagaatctgtggcttggagttcagggtcatcaagccagaatgggctgattaacaataaccaattgttatcacctttcacaggtcacaagtctgacactcaccgatcaggaggcagggagagaggccgatccaaagaacgaaagcacctcctctctccagatgtctcccgctgcaattctgaagagcgagggacccaggccgactgggagtccccagaacgtcgccagtccaggtcacccagtgaaggaaggtcacagacccccaatagacaggtgaatatagagaagttgagcctctagcaggtcagggaagggtggaatgctgtactagaaggggcttccattgcctcatgtcagcctctgggacctcagctcctgatgttcacaagagataaccactgaacacagagactggctgttctgtgcttgcagattcagaagtggcaggaattcacaagaaatgagatcctcccagtccccaagaaagacaatatctggaagtcagtccatgcctgtcctcagtatcctgatatacaaattcagctagacttaagaaataaagatggcctttcagcccataaggtgtgattctcagtaccaactgcaatgataattcatctctaaagccagaatttgcaagttggacaactccactttgcttacggattgtgtagccctctcaggagaaggagcacatctcacctctccatcttttcctaattcccagtctatgcctaagaaatagctgtgtagcagtgttctttgtgttgcccctcttttccagccctaacccttctcaaagttcctggagtccagatggaagacacatttggttagaaatggtgagccaagaacaagagactgttaaagcaattctgagacatagcagtagagaaatttacccaagacatagtggtttccaaattgtattgtagaacagagccagccctggagtttgctagcacagcaaatccctgaaactttgaagaatccaatgagacttgcttaaaagtcaaacccagaatttcatatcttaaaggaccccaccccagaaaattcttacaggtggctcacagatttaacacaccttgagagaccagtgctggaagccatttgccaacacctgggctcaagtatttcatggactaggcaaggaagacagataagggcagagacaatagataagggcgtgttggccatagaagccaagggcagcaaaccatcactaatagaggggcaagaaaacaggctttaggtcacctcagatacttacagtgtactctagttgggcgaccaggtgttagggattagttctagtgcttgtctaagggtccctgcccccagctggctgattggtaataagaattgctgtacagccaatggctgggcagagagatggagcaggacttttagattgtgcaggtaagggacaaaaaaaaaaaaggaggaggaggaggaggagacttgaaaaagacagaatcaccatggcagggaagcagaaagatgaaactcaaaggctcaccggcatgtaagaatctgggaacataacttgtaataaggacacatgctccactatattcatagcagccttatttataatagccagaagctggaaagaacccagatgtccctcaacagaaaatgtggtacatttacccaacggggtactactcagctattaaaaacaatgaatttatgaaattcttgggcaaatggatggatctggagtatatcatcctgagtgaggtaatccaatcataaaagaacacacatgatatgcactcactgataagtggatattagcccagaaacttagaataccagagatacaatttgcaaaacacatgaaactcaagaaggaagacgaaagtgtgggtacttcattccttcttagaatggggaacaaaatacctatggaaggagttacagaaacaaagtttggagctgagactgaaggaaggaccatccagagactgccccacctggggatccatcccataaacaactaccaaacccagacactattgcatatgccagaaagattttgctgacaggaccctcatacagctctctcttgtgagtcagtgcctggcaaacagagaagtagatgctcacagtcatctattggatggaacacagggtccccaataaagtagctagaggaagtacccaaggagctgaaggggtctgcagccctataggagaaacaacaatatgaactaaccagtaaccccagagctcgtgtctctatctgcatatgtagcagaagatagcctagttggccatcagtgagaggagaggcccttggtcttgagtagattctaggccctagtatcggggaatgctagggccaggaagtgggagtgagtgggttggggagcagggagaggaggagggtataggggattttcagagaagaaactaggaaaggggctagcatttgaaaagtaaatgaagaaaacatctaataaaaaaatcttagccgggtgtggtgttgcttgcctttaatcccagcacttgggaggcagaggcaggcagatttctgagttggaggccagcctagtctacagagtgagttccaaaacagccagagctatacagagaaaccctgtctcaaaaaaaaaaaaaaaaaaagaatctgggaaaatggccctaggggctacttcccctttgggtctgagatagcagagatgtaataatagattttaactcaggtatactggaggagagtgtttgctagtggtggagaggtttagaagtgcccaaccattgatctagtcaagacatatcaaaattaatgtctgtgtgccttacattcttgaatccaaagctcttgggcaggtgccatgtgtactcaacctgctgtaagccaaagcagtttaacaaattcaccactacaaaagggaaggaagagaaatttgctcttgcttagaactcgtttcctgaacagactgggattctaagcatcctttcagagagctgtttggcctagaaccttctgatattcctgtatgcagtttccaggtcctggctagccatctgggggttttattgtcacagtggtcaggtctaccccaaacccatagtggctaaacctgcatcattagttgaacttgatttccagagatttgttctgatctagacggcatctacttctctactcatttgatcgctgagtccctgcagggtatgagtagcagaggggactaactctcaggctactccagatctctagactcacagagctttctacagaaggggttggcaatctcaggagggcccaccatgcctaatctaatctgtcatctcccatattgcagggtaccggttccctaagtgagagctccatcccctctatttccgacaccagcaccccaagacgaagccgtcgccagctcccacctgtgccaccaaagcctcgtcccctcctctcctacagctccctgatgagacacactggcggcatctctccacctcctgatggaagtgagggtggatccccactggcctctcaagctctggagagcaacagcgcttgcctgaccgagtcttccaactccttgcacccccagcagggccagcatccttccccacagcactacatctccgagccctatctggccctccatgaagactcccacgcctcagactgtggcgaggaggagacactcacctttgaggcagccgtagccactagcttgggccggtccaataccattggctctgcgccacccctacggcacagctggcagatgcctaatgggcactatcggcggcggaggcgtggggggcctgggcctggcatgatgtgtggagctgtcagtgacctcctgagtgacacggaagaagacgataagtgctagaggctgccatcccctccgatgcatgctcttctctcacaaggagaaaaccaagaccaaattgggaagccagtgcggcccgggggggaggaagagggagaagaaagatggagaaaggacgccaatgcatcctcagcgaagaggaaggaaaagacagatggaaaaacagtcgaacccaccaatttggattatttccctttgcaacatgggcactgccatagtcctgcctctttgctggggaaaaaaaatacaagaatgtggggggtttattcccatgggagaagggacatgaaggtggcttggcttccgttgccccttcccacttttctataagctgcggcaggatctggctgacctgtgtctaagctcattgccctgggcagctgggaagactttccagcatcttaatgagggaagagttgaaatagcaggagaagaatctcctcaccagctcttgcactttggctgcccccaggggcaaccgcagcagcatctcatgcattatcttggggcttgctttcccccaaagagacacatgctaaatcaggagcactggatgctagtgggagatgggagggagggagagaagggccggagtagaagggcccaaggtgctgtggcaacagcagcaagggctggtctgggtgagaaaagccatagcccagcagcctgtaccatgaaggtgagggtcaaagaaacagaactggaggtgctggtgggtacagtcctagactctaacatttgtaactcacacagtaggtgctgtggtaggtaggctagaaaaggaggttctccagggcccacaaaggtgcctgtagctcttgtaagggtaatattaactccaatagcaagggccccaaccccagaagggttcagccacagtataggaactccatgcagttctccaccttggccctttagatactcgtcagagggaacccccaacagtaggggcgaggtagatggggagacttaaggcactctgggcagactcagttttccaacaaacataaaaggaactcagtgttggtggcagggctgtgaccacagtgggctggaggcaggcagcaggcctctgtcagacagcaagactaatgctaagccaagcccagaaaagccaggtattagcaactacatgttctctgccacttctccaaatggacagggaacacacatccaagggggtcactgcgtaatgacttctctacagatgagaaagcctggtagactgaaatgggaatgttcccaaggggcctggggatcccctgtgaggagaagtccttgagcctgaagctcatgcagcttggtttggggtttggggagtcagttgaggtacttaagataattaagtaactatacctcagttttgacctgagctgcggattttagtaaaataggctctgatgtggctcccactatctctgaatattccctgggccaggcctgggttccatccctccccagagtaaaggatgggtagaagacaaccttgggccactgagtcattcctaatcccccaaaccagaaacaccaagggaacttaggacccttcctcaagcacttccatcaataacacagttaaaagttccattctgtggaatgcatcccccctcccttaagcttctctctagtatcatcagagtgggtgaacagatacttgggagcagggtgttgggcaggactgccctctctggcctctgcacaggacgctctccatgagactggagaccaacacactgaaagttcagtggatcgagtctttatcctcttccagactaggcagagtcttttgggactcttgtgtaggagcagaatttcttagaagaaaattctcttttcatatgacatttcctttctattcttctgtcccattctttctaaccctgggctgacaccgcagcagcagcagcagttctgaaaagccaagttcatccatgtggccacattcatctgccacactctgccttctcttttgagtattgatggagctttcatgaaccatggtcagccccaaaccaaagtcatcccataacaggtgaccaacgaggccaacctaaggcctgccaaccctcagatcctccccttccacctccattgtcctctccctgtgtgctcaggggcagctaagaatacaagcatgatcctaagggacgtatgtgattgtttcataagacggatgctaggacttgtgttgtttttaaggttttctctgctcagcctcattccatgccaaagtgctgctgctataggcctctttgtgtgcacaaaattgctttccactatattggacatgcagctttccttaggggaagcctgcaacaggatggccattctgagccagcaaacctgttggatggtggtttgtgaaagtcaattgcagagatatagcactaccatccctataattggagaaatgtgggctggcagcacaatgaccagatatggaattcacctgcaaaggatagtatcagtaaatgcacactcacacacacgcacatgcacacgcgcacacacagccttgtaaagatatcaagtattatagctgtggtcaattaactgatcacatagtttattttttagcactggtgaccttataaacatttctttgttcaacttaccctgggtttcttttatcttggacaacacttacccttcattaagaccagaacatagaagaatttctattaagccacaaacacattattataataatctccagtttcctactgcctcctaataaacttgaatgccaacctccttccttgtagctgaccagagctttccctcctagctatcagagcctgtatctttctctttaaagggaagttgctttctcaaagcccatgtttctctttgcatcttccagtacatagcatgactctttgtggaaagtcttcttgcagaattctttagtcatatatctcattaccctgcaaaaatatttggtcctcatcacctcaaaacaagagagaggagaagagggggcatgacaagcagaagccaggcagggaggtggtatgactgcgcttgtgtttgggcatgccttttctcttaaggttccagacagcttttcatgtccctaccttcatatctgtaggagggtacagcagccttcaaagggataggaggttcaagccaatgtgccctgtgtgtcaggaaaaacacatgcccatgaaggaatggtaccctctagtaccaccaagctccacatgagccataatgatagggtccaaggggagggagttataccacacttctacctgaggattctaatttaactgaagttttcacttctggttccagctgttccagatgttctgaacatttctcttccttcactctgaggccacacgaagagtaccccatatcccagcctttagtcagcatctccctttcctacctacgtccatcccccaccaccacaggttctttgtgtgaactgtagtgctccttggtcttccagtcgagtctttgttttgctgcatgttagcacaccctgagatggttaaatccaagtgtatgagatgcagtaactgctcctgccatgctgttaggaaatggttccttctcatgaagccttgtctgaagcttcctgggtgagcttcacaagaccatttcaagggaactgtaaaagagtgcacacaggtctatgttcccaatagaggctcactacagagagattaggtctctttggtatagtggaacaaattttttaagtaatttcgatttatttttaaacatgaatatttttgttacatttctttctgaagcctgtaatgtctgtttttttgttttttttttttttttggatagaatttctaggtaggtagagcagggagttgggaactttgtttctcagcttggttataacaatgacaaagttgaagttctatgtaaaggaaaggtggacagtgggagggaatcagattgtctcctgatacgcagagatttttctgagatttgaaagaactttcactgcagttatccctataacagggtcatgtctgtcatgttttgaaacaatttccccaaggcttgaggctactgaggcaaagcagccattccttgggaaggattccctgtcccacccagcctggatgtgtccttccctcctggaccccagagcatcacatactccaagagaaacgggaatactttatgaagcaggtagaagaggatcagctgaccccatgtaggtgaccagtcacagcgtgatgattaacaccagacaagaacccctgaggaatctgatgcagttcagatgagttgtctttaaatatctccacatggagaatcttctcttaacaaaagctaaacaaaattaacttaggggttatgacccaactctcccatgaatgtgatcagaggcagccccatgttaagtgctgtctgtaccagtaagtagccttttgcagtgtttcctctctgaaccacccagaacaccctaggcaggtctgtcccaaacagcagcagctgataccttctccattggccaaagactgctagggtgttttgtcagctgtcacaggctacacccatagtacacagatgtactacatgaggggaaaggtatggaaaaaaataatcctatttgctttctggcagacatctatgcctttccgtgaatctttttggtgttttgggttttttccccttaattaatttcgtctgtgtcgtgtgtatcccagagaagtcacatgacaccaaaacaacaaattcacaaattggtccaacctaccccaagggtctagaaagcatctctgaatagagttcaagttagctcatttaatgggggctcccagcaaaatctaatatgattcctggtaaggtctgggcccttgcttctatttttaataggtttcttactgcccacacatttctatcatgctatgtactggaaggttagtgtcctaaccttctagatgcaaaaagagactttataataagccatgctactactatgtaaatacattcttgggtttcaagttcttgtttatctagttttggaagagctggagagacaatatagaagtattgagattaatgtttatttatatcagtttggtagtttttgtttgattgattatccaagtattttggaacaggcccaatctaggacagccaagaaggataaatctgtgttctacagtattctgaatttgcttcttttctaagactaatttctgtcaaattagtgctatgataattgagtcaaaaacctgaagttattgtctcctcccatctctgtatccaccccacccttctgtcttgttaagtggccttggacccttgtctccccatattctgcctctcctctttcaaaggtctgaaaatataacttagacttatgaaaaaaaactgctttgcccagcaaatcagtcaaagtcaaggaaattataagatacagaattatttcagaacaaaccttaaccaatacataatacagaatgtattctgcagtaagaagccaagtttaaacaatatagcaatgtgacaaatgaacatcataggaagctatagtgagtactatccaggcttcacaactcatctgtgccttcagtatggatattgcatgtatttcctttccctagttagggaaattgaaattctgatgcttgactagtacatgtgtgtgccgagggctctgagttaataattataaagcacgtgcctccacaagtcaagttggaaaaaccttcactcactatatcaaggacttgggaacttcttagcatttcttctaagcattgaatttttttaaggaaacctccatcttaatgggactgaggctaagtttgctttactcctgctttctacatcttatattttcttctcacattagcactctttttcttttcttaatccacgctgttttcattaatcagaaaagatgaattcctccaacaaacttcctactaccatcttctctttgtggacacttaagtcagagagtgagtaaccagaaactaacacagaagacaattacctagcctgggttagaaatgtgagtaaattttattttaattttttttcctacaagttttctcgagataaaaataggttggtctctatattctgaaaggacatgtttgaactcgaattgcatggttgcaccacttcctctttggttctcagagatgatgtcccctaaactaaataggaagccatcatcctcatctgccgtatctggcttggacctgatttgacgactcagctgttttctttgcgtcattcttatttcttataggtgatagtctatattgcccaagagctgatgctttaaagcaagtctatcaaggatatttatgagatgaacaaggaaaacatttaaatgtgtcaagtgccattaatcaatttttaaaataacggtaatatgaaatgagggctaaatagtgtaatctaactgccaattaaagtacacagtagttctggtcttagttacctttgatatgaagttataggccattaagcagatccccgtgggtttagtaaaaacataggcgtagcgttttaatggctacaataggggcgtacatttagaccgcaggttgaactttaatcagtgtttttctatcctggtgttttgtgaacaatccaaaatttctacaaagctaccctaagtgctgcaattgcagaggaacttccctcttggtggcattagaatgctcaggctgagtccaagatttagaattcacccagaaaaccaccaatggagaaacacttaatgcactaagtatgtttgacattctgtactggggacaagtgagtatagagaaagagagagacactattgaacaaagacaaagttgacatggaagatataaaaagtccccgaagagaacaagcttaaagatgtttgactttggattctacttcttgcttagatttggggtaaatgctttaatatgatattggattcagaggggttgctttggtaaactgacttgaatcccccccaaaattagtggattaatgaacatccttttcagacctgacagatggaggaggcaaaaagcagcccaaagaatctatgacttcagaaactcatatagtaagccaatactgcagagggcacagtacccttcttagcagcctttgtgccataggagggggaaagagcccatgtaggggacaggaggtgttttgtcaggaataaatttcaaatggtaaggtgcactggtactaacctcaaaggccaacattgtgggaaagtgatgacaggtatctaggtcatcccttccatcctttgggacccaaggagaggccttgatttgatcttagaaaatgaacatgggatgggatcaagagggaaattgagtgctctgcctaaggttgtcaaaaatgctgccacccacattatcaaacatgtgagtcaagcccatgagacgcccccttaagggcagcatccactggggtgtatcagcctgacactcctgcagtagtcataggtgattgaatggcagccaatgctggcccacccagagtattggtgcatctcgcctaacactggagttcaacagtgcatgttggtcaggtggatatcctgtaacataaatgctcgtttggatccaaaaggaaaaccattaaaaataaaaggaagatgaacaactttattgctgggggggtgggtcaaggaaaagtaaaataaaaccttgttgtaaagaatcaattggcctggttccccttgcttctcttgtctttgtctctgctgatgaagtagttacgggctttggtaggtggatcagcagcaggttcagtaatcaagacaagtcagggtcagtttagcccagttgtgaatacttctagatattctcaaagttcccaggacatgatggtctttaaaggttttcttcctattaaaaatgacccttttcatggaagaaaagaaatgaattgccctaaaactgatttctcaaaaaaattaaaaattaaaaaacaaaacaaaaacgagtttctagccaagggaatcagtctatcaggaaaagagattagcagcagacagtcactatacggagccatagaccttgtaattaaaaaactctaaggagcctccattctgaaggagggagatgactaaagaactcctcctgccgtgctgccagccttgggaggaagctgactcctcctcaaggctctgaggagatgctctctctcatctctcagcctacctggctttttactcaggtgtagtagttttctgactgaatggaggaaaagccatgccttgtatccatgggcccttttgactctccattctaggcaaagccatctgtgtcatcccctggggtaccaactttttctccaattctaaatatattatttaagttgcaatacttctaaattttggttagatagaaatcagcatttcaggatatatttctgtatcttggttaaagatcttcttttaagaattaagatactagatttcattaggtaagacttttttttgcttagggttgaacctttcaaaaatgtggtatgcagccatccatctcaagttctgaaggctgggtggaaagtttatacatccataaacaacttcttaggtttttttctaaatcatattgttctagtgattcaatcatggtttgaattggaaacaaatttgtcaactgctacatcaaagtggtatggcatggcacaatattttcttcaacaaaagtagatttatgaagttacctggattggttttttttttattttttcaggattattctaatctaaaactccagtccatatcctttcacaggctaataatactatgaaatacatacaaagaaaaaaacagatgctattctaaatttgtctctagcttctacaccataatctgagtttctaaggggttacatttacatgctatgccctaactccatacactgcttctggaatatcatatcctgacttgactcacataccatgttcttttgctatagacctagggtaattcccaaaccaaagtcccttaagtatttaagcatctaaatgtagtgtggcacacctctggtcccaatacttaggaggttgaagcaggaagacacagaatttttggccagtctgggctactctgtgagatcctaactttaaaaacaaagcaactcaagcaaaacacaatcgcaaaatattgagacaagttacagatgaatatggctttagaacacctaaaacaaaaaggccaccaacagattgggaaaggatctttaccaatcctaaatcagatacgggactaatatctaatatgtataaagcactcaagaggatggactccagaaaagcaaataaccctatttaaaatggggtacagagctaaacaaagaattcttaactgaggaataccaaatggctgaggagcacttggaaaaatgtccaacatccttaatcatcagggaaatgcaaatcagaacaaccctgagattccacctcacaccagtcagaatggctaagatcaaaaattcaggtgacagcagatgctggtgaggatgtggagaaagaggaacattcctccattgttggtgggattgcaagctggtacaaccactctggaagtcagtctggtggttcctcacaaaattggacatagtactacctgaagatccagcaattcctctcctgggcatatacccagaagatgtttcaactggtaataaggacacatgttccactatgttcatagcagccttatttataatagccagaagctggaaagaacccagatgtctctcagcagaggaatggatacagaaaatgtggtacatttacacaatggagtactactcagctattaaaatcaatgaatttatgaaattcttaggcaaatggatggatctggagtatatcatcctgagtgaggtaacacattcacaaaagaacacacatgatatgcactcactgataagtggatattacccagaaacttagaatatccaagatacattttgcagaacacatgaagttcaaaaagaaggaagaccaaagtgtggatagtttgctccttcttagaatggggaacaaaatgcccatggaaggagttacagagacaaagttaggagctgagacgggaggaccatctagagactgcctggggatccatcccatatacaaccaccaaactcagacactattgcatatgccagaaagattttgctgacaagactctgacatagctctctcttgtgaggctatgccagtgcctggcaaatacagaagtagatgctcacagtcatctattggatagaacacagggtccccaatgaaggagccagagaaagtacccaaagagctaaaggggtctacaaccccataggaacaacgatatgaactaaccagtacccccccccagagctgtgtctctagttgcatatgtagcagaggatggcctagtcagccatcaatgggaggagaggctgtttgtcttgcgaaaatcatattgcccagtacaggggaatgccagggtcaggaagcgggagtgggtgggttggggagcagggcaggggggagggtatatgggactttggggatagcatttgaaatgtaactaaagaaaatacctaatttttaaaaagaaaaaataataaaagaaaatggtaaaataaaaaaaaatagaacaccttaaacataagaagcaacaacggaagaggaagaggaaagaatacagaagaaatgaagagtgatgtgtacaggtacctagagagtccacagagggtaaactgttcatttactctgtgtccttgattaggtctgcatgcttaaaggaaaatgataactaattacctcaaagatctgctgttcagagaaagttattacatatcaagagatcggccagatacttccattgtactgataacccttcccttcctcatcaccacacagaggtgtattcctcaaacccaccacccctctgagctgaacctctcaggacctcattctagtcagtagagggtgttgggtgggtgggtatttcctgtcagttaataaaacaaatgcaaaggacaatttgaacttctatggaaaagtgaataaaagagctttaaaaaaagcaagcaaatcataattatataactgtttttaaatactccctccatttttgtcttagaaagaggccctcatttgcttattctccacttctaatttccatattcatttaataacaaaatgggagaaacattagtgggagatagtaattgtaaaagtagcaataaagttaatggcaacattaaaaacactgtacatataaacagcaatattcaaggcaatttaaaatgtcaagcaatacacaacttaacagcatgtgagaataaactatcaattcagggtcaatagactgacttttctttttttattgcataaaaaaaaacaagaaagaaaaagagaggagtacacagttatatacctacagtcctagcaccagggatgctggggcaggaatatcacaagtttgaagctagcctgggctatggaatttgaggccaatataggatacatagcaagcaagatcccatcttagtcttccattccccctacatgttatctgtactcctggccccccaaaaagaatatgaagtaaatgaatcctttaaaacaatcatccttaggtgggccattaaaaaattactaaaagccagcaatttaggaaataaattgatactcaatctttataggtgattgccaaaaagtcaggataccacaagtaaaacaatgtaagcccatctagaggaggagtccaatgcctccggacattggttcttgccctctgaatattcgacatttaaaaccatctctgtggataaaattaacatagctatagtacattatagcacataggaaccataaaccccagaatacttaagcaagaaagaggctagatatcaactatggcctggactatttccccttgcctaaaagaaattagattagaacaactgttaatttttctagcaaacaatgacatcacttcttgaggtggtcttagagaccccaatacaaccattcaaaagagaaatgcctgagaagggccttttgctcatgtgtccaggtgatccctttttgtagttttatcaaagttgtgcatcactgcccttgaagaagggaactcaaagtctcagctcattcatatctttcagcctcacacaccgatgcccgctcacaagccctgcatcagacccaggaaaaaaaaaataaatgaaagccagccattcaatagacccattcacatcagaagaactcagtacatgagttgtggtctaatagaaagaaagaaaaaaaaaacagcttgatttcttgacatagtggaaacacaggtttgcttgttctgcccgaaagcagatgccttgatgctaatgagaaaccagtgtagatagctggaatggggtggggaagtgaaaagggcatcatatcaatttggctagcaaggatgctgatgtatggttgtaggtaaacctctgctacacg

SEQ ID NO: 1175 - DNA, 9704 bp, Mus musculus
tccttcttcctctctacccctcaccccgaccaataaatcagcaaactgttacctagcggaccagtgcctgcctttctctcagccaggtgtgccagaagaggagctatgtttgaggaccgaccttctccacccctctccggtccctgaacaccaccccacgctggcattttgggggaaaatattccctctagaagccctacccccttcttcttcttcttcttctttttttttcttgaggaatggagcttcgcagaggttgcctttagattcaacagttcagagcagggctgaagagcctgcaggggtccccagaggcggtggtccctgcgcctgtgtggataaggctctgagcctgcctgtgtcttttctgcctcttgttgtgtgcgggtgttcggcgatcacctttgtgtgtcttctgtctgtttaaacttcaggatggctcgcttcggggaggcggtggtcgttggcaggccaggctcaggcgatggagactcggaccagagcaggaaccgacaaggaacccccgtcccggcctcggggccggcggccgcctacaagcagtcaaaagcgcagagggcgcggactatggctttgtacaaccccataccagtccggcagaactgtttcacggtcaacagatccctgttcatcttcggagaagataacattgtcaggaaatacgccaagaagctcatcgattggccgccatttgagtacatgatcctggccaccatcattgccaactgcatcgtcttggccctggagcagcatcttcctgaggatgacaagaccccaatgtctcgaagactggagaagacagaaccatatttcattgggatcttctgctttgaagctgggatcaaaattgtggctctagggttcatcttccataagggttcatacctccgtaatggctggaatgtcatggacttcatcgtggtccttagtggcatcctggccactgcgggaacccacttcaacacccacgtggacctgcggaccctccgggctgtgcgtgtcctgaggcctttaaagctggtatcaggaatacctagcctgcagatcgtgctgaagtctatcatgaaggccatggtgcctcttctgcagattggccttctgctcttctttgccatcctcatgtttgctatcattggcttggagttctacagtggcaagttgcatcgagcatgcttcatgaacaattcaggtattctagaggggtttgatcctcctcacccgtgtggtgtgcaaggctgcccggctggttatgaatgtaaggactggatcggccccaatgacgggatcacccagtttgacaacatcctttttgccgtgctgactgtcttccaatgcatcactatggaagggtggaccactgtgctgtacaataccaatgatgccttaggagccacctggaactggctgtacttcatccctctcatcatcatcggatccttctttgttctcaacctcgtcctgggagtgctttccggggaatttgccaaagaaagagagagagtggagaaccgaagagcgttcatgaagctccggcgccagcaacagattgagcgagaattgaacggctaccgtgcctggatagacaaagcagaggaagtcatgcttgctgaagaaaataaaaactcgggaacatcagccttggaagtgcttcgaagggcaaccatcaaaaggagccggacggaggccatgacccgagactccagcgatgagcactgcgttgatatctcttcagtgggcacacctcttgccagagccagtatcaagagcacaaaagtagatggggcctcctatttccggcacaaggaacggcttctgcgcatctctatccgccacatggtcaagtcccaagtcttttactggatcgtcctgagtgttgtggctcttaatactgcctgtgtggccattgttcatcacaaccagccacagtggctcactcacctcctctactatgcagagtttttgtttctgggactcttcctgttggagatgtccctgaagatgtatggcatggggccacgcctctattttcactcatccttcaactgctttgattttggggtcacagtgggcagcatctttgaggttgtctgggcaatcttcagacctggcacatcttttggaatcagtgtcttacgagctctccggctcctaaggatatttaaaataaccaagtattgggcatccctccggaatctggttgtctccttgatgagctccatgaagtctatcatcagcttactcttccttctcttcctcttcatcgttgtctttgctctcctgggaatgcagctctttggaggcaggtttaactttaatgatgggactccttcagctaattttgacaccttccctgcagctatcatgacagtgttccagatcctgacaggggaagactggaatgaggtgatgtacaatggcattcgctcccagggtggggtcagctcaggcatgtggtctgccatctacttcattgtgctcaccttgtttggaaactacacgctgctaaatgtattcttggccatcgctgtggacaatctggccaatgcccaggaactgaccaaggatgagcaggaggaagaagaagccttcaaccagaaacatgcactgcagaaggccaaggaggtcagcccgatgtctgctcccaacatgccttccattgaaagagacagaaggagaagacaccacatgtcgatgtgggagccacgcagcagccacctgagggagcggaggcgccggcaccacatgtctgtgtgggaacaacgcaccagccagctgaggaggcacatgcaaatgtctagccaagaagccctcaacaaagaggaggccccgccaatgaaccccctcaatccactcaacccactgagtcctctcaaccccctcaatgctcaccccagcctttatcggaggcccaggcccattgagggcctagccctaggtctgggtcttgaaaagtgtgaagaagaacgcatcagtcgtgggggctccctcaagggggacatagggggcctgactagcgccctggacaaccagaggagccccttgtccttgggcaaacgggagccaccgtggctgcctagatcctgtcatggaaactgtgacccaatccagcaggaggctgggggaggagagactgtggtgacttttgaggaccgggccaggcacaggcagagtcagaggcgaagccggcatcgccgagtcaggactgagggcaaggactctgcctctgcatcccgaagcaggtctgccagccaggagcggagtctggatgaaggggtgtccgttgagggggagaaggaacatgagcctcacagcagccacaggagcaaagagccgaccatccacgaagaggagagaacccaggacttaaggaggaccaacagtctgatggtccccaggggctctggactggtaggggctcttgatgaagcagaaacacctctagtccagccccaacctgagctggaagtggggaaggatgcagctctgacagagcaggaggctgaaggcagcagtgaacaagcccttcttggggacgtacagctggatgtgggccggggcattagccagagtgaaccggatctctcctgcatgacagccaacatggacaaggctaccacggagagcaccagtgtcacggtcgccatccctgatgtggaccccttggtggactcgacagtggtgaacattagcaacaagacggatggagaagccagtcccttgaaggaggcagagactaaagaggaagaagaagaggtagagaagaagaagaagcagaagaaggagaagcgagagactggaaaagccatggtgccccatagctctatgttcatcttcagcaccactaacccgatccgcagggcctgccactacattgtgaacctacgctactttgaaatgtgcattctcttggtgattgcggccagcagcattgccctggcagccgaggaccctgtactaactaactcggagcgtaacaaagtcctgagatatttcgactatgttttcacaggagtgtttacctttgagatggttataaagatgatagaccaaggcttgatcctgcaggatggatcatacttccgagacctctggaacatcctggactttgtagtagtggttggtgcattggtagcatttgctctggcgtaatcctctctctgcagaaccaacaaggggagggatatcaagactatcaagtctctgagggtacttcgagttctgcggccactgaaaaccatcaagcgcttgcccaagctgaaggctgtgtttgactgcgtggtgacctccttgaagaatgtcttcaacatactcattgtctacaagctcttcatgttcatctttgccgtcatcgctgttcagctattcaaaggaaagttcttttattgcactgacagttccaaggacacagagaaggagtgcataggcaactatgtagaccacgagaaaaacaagatggaggtgaagggccgggaatggaagcgtcatgaattccactatgacaacatcatctgggccctgcttaccctcttcacagtctctacaggggaaggatggcctcaggttctgcagcactctgtagatgtgacagaggaggacagaggcccaagtcgcagcaaccgcatggagatgtccatcttttatgtggtctactttgtggtcttccctttcttctttgtcaatatcttcgtggctctcattatcatcaccttccaggagcaaggggacaagatgatggaggagtgtagcctggagaagaatgagcgggcatgcatcgacttcgccattagtgccaaacctctcacccgctacatgccacagaacaggcacaccttccagtaccgtgtgtggcactttgtagtctccccatcctttgagtataccatcatggccatgattgccttgaacactgtcgtgctgatgatgaagtactactctgctccttgcacctatgagctcgccttaaagtacctgaacatcgccttcactatggtgttttccctggagtgtgtcctaaaggtcattgctttcggcttcctgaactatttccgagatacctggaacatctttgacttcatcacggtgatcggcagtatcacagaaattatcctgacagatagcaagctggtgaacaccagtggcttcaatatgagctttctgaagctcttccgagctgcacggctcataaagcttctgagacagggctacaccatccgcatcttactgtggaccttcgtgcagtcctttaaggctcttccctacgtctgccttctcattgccatgcttttcttcatctacgccatcattgggatgcaggtgtttggaaacataaagttagatgaggagagtcacatcaaccggcacaacaacttccggagtttctttgggtccctcatgctgcttttcaggagtgccacgggggaggcttggcaggagattatgctgtcctgtctcggtgagaagggttgtgagcctgacaccactgcaccctcagggcagaatgagagtgagcgctgtggcactgacctggcctacgtttattttgtctccttcatcttcttctgctccttcctgatgctcaacctgttcgtggctgtcatcatggacaactttgagtacctgactcgagattcctccatcctggggcctcaccacttagatgagtttgtccgtgtctgggcagaatatgacagagcagcatgtggccgcatccattacactgagatgtatgaaatgctgactctcatgtcaccaccgctaggcctcggcaagagatgtccctccaaagtggcctataagaggctggtcctgatgaacatgccagtggctgaggacatgacagtccacttcacctccacacttatggctctgatccggacagctctggacattaaaatcgccaaaggtggtgcagacagacagcagctagactcggagctgcaaaaagagaccctggccatttggcctcacctgtcccaaaagatgttggatctgcttgtgcccatgcccaaagcctctgacctgactgtgggcaagatctatgcagcaatgatgatcatggactactataaacagagtaaggtaaagaaacagagacagcagctggaagaacagaaaaatgcacccatgttccagcgcatggagccctcatcactgcctcaggagatcattgctaatgccaaagccctgccttatctccagcaggaccctgtttctggcctgagtggtcggagtggatacccttcaatgagtccactctcccctcaagaaatattccagttggcttgtatggacccagcggatgatggacaattccaggaacaacaatctctggtggtaacagaccctagctctatgcgacgttcattttctacaattcgggataagcgttcaaattcctcctggttggaggagttctccatggaacgcagcagtgaaaacacttacaagtcgcggcgcagaagttaccattcctccctgaggctgtcagcacaccgcctgaattctgactctggtcacaagtctgacactcaccgatcaggaggcagggagagaggccgatccaaagaacgaaagcacctcctctctccagatgtctcccgctgcaattctgaagagcgagggacccaggccgactgggagtccccagaacgtcgccagtccaggtcacccagtgaaggaaggtcacagacccccaatagacagggtaccggttccctaagtgagagctccatcccctctatttccgacaccagcaccccaagacgaagccgtcgccagctcccacctgtgccaccaaagcctcgtcccctcctctcctacagctccctgatgagacacactggcggcatctctccacctcctgatggaagtgagggtggatccccactggcctctcaagctctggagagcaacagcgcttgcctgaccgagtcttccaactccttgcacccccagcagggccagcatccttccccacagcactacatctccgagccctatctggccctccatgaagactcccacgcctcagactgtggcgaggaggagacactcacctttgaggcagccgtagccactagcttgggccggtccaataccattggctctgcgccacccctacggcacagctggcagatgcctaatgggcactatcggcggcggaggcgtggggggcctgggcctggcatgatgtgtggagctgtcagtgacctcctgagtgacacggaagaagacgataagtgctagaggctgccatcccctccgatgcatgctcttctctcacaaggagaaaaccaagaccaaattgggaagccagtgcggcccgggggggaggaagagggagaagaaagatggagaaaggacgccaatgcatcctcagcgaagaggaaggaaaagacagatggaaaaacagtcgaacccaccaatttggattatttccctttgcaacatgggcactgccatagtcctgcctctttgctggggaaaaaaaatacaagaatgtggggggtttattcccatgggagaagggacatgaaggtggcttggcttccgttgccccttcccacttttctataagctgcggcaggatctggctgacctgtgtctaagctcattgccctgggcagctgggaagactttccagcatcttaatgagggaagagttgaaatagcaggagaagaatctcctcaccagctcttgcactttggctgcccccaggggcaaccgcagcagcatctcatgcattatcttggggcttgctttcccccaaagagacacatgctaaatcaggagcactggatgctagtgggagatgggagggagggagagaagggccggagtagaagggcccaaggtgctgtggcaacagcagcaagggctggtctgggtgagaaaagccatagcccagcagcctgtaccatgaaggtgagggtcaaagaaacagaactggaggtgctggtgggtacagtcctagactctaacatttgtaactcacacagtaggtgctgtggtaggtaggctagaaaaggaggttctccagggcccacaaaggtgcctgtagctcttgtaagggtaatattaactccaatagcaagggccccaaccccagaagggttcagccacagtataggaactccatgcagttctccaccttggccctttagatactcgtcagagggaacccccaacagtaggggcgaggtagatggggagacttaaggcactctgggcagactcagttttccaacaaacataaaaggaactcagtgttggtggcagggctgtgaccacagtgggctggaggcaggcagcaggcctctgtcagacagcaagactaatgctaagccaagcccagaaaagccaggtattagcaactacatgttctctgccacttctccaaatggacagggaacacacatccaagggggtcactgcgtaatgacttctctacagatgagaaagcctggtagactgaaatgggaatgttcccaaggggcctggggatcccctgtgaggagaagtccttgagcctgaagctcatgcagcttggtttggggtttggggagtcagttgaggtacttaagataattaagtaactatacctcagttttgacctgagctgcggattttagtaaaataggctctgatgtggctcccactatctctgaatattccctgggccaggcctgggttccatccctccccagagtaaaggatgggtagaagacaaccttgggccactgagtcattcctaatcccccaaaccagaaacaccaagggaacttaggacccttcctcaagcacttccatcaataacacagttaaaagttccattctgtggaatgcatcccccctcccttaagcttctctctagtatcatcagagtgggtgaacagatacttgggagcagggtgttgggcaggactgccctctctggcctctgcacaggacgctctccatgagactggagaccaacacactgaaagttcagtggatcgagtctttatcctcttccagactaggcagagtcttttgggactcttgtgtaggagcagaatttcttagaagaaaattctcttttcatatgacatttcctttctattcttctgtcccattctttctaaccctgggctgacaccgcagcagcagcagcagttctgaaaagccaagttcatccatgtggccacattcatctgccacactctgccttctcttttgagtattgatggagctttcatgaaccatggtcagccccaaaccaaagtcatcccataacaggtgaccaacgaggccaacctaaggcctgccaaccctcagatcctccccttccacctccattgtcctctccctgtgtgctcaggggcagctaagaatacaagcatgatcctaagggacgtatgtgattgtttcataagacggatgctaggacttgtgttgtttttaaggttttctctgctcagcctcattccatgccaaagtgctgctgctataggcctctttgtgtgcacaaaattgctttccactatattggacatgcagctttccttaggggaagcctgcaacaggatggccattctgagccagcaaacctgttggatggtggtttgtgaaagtcaattgcagagatatagcactaccatccctataattggagaaatgtgggctggcagcacaatgaccagatatg

SEQ ID NO: 1176 - protein, 1274 aa, Mus musculus
GSEPACVFSASCCVRVFGDHLCVSSVCLNFRMARFGEAVVVGRPGSGDGDSDQSRNRQGTPVPASGPAAAYKQSKAQRARTMALYNPIPVRQNCFTVNRSLFIFGEDNIVRKYAKKLIDWPPFEYMILATIIANCIVLALEQHLPEDDKTPMSRRLEKTEPYFIGIFCFEAGIKIVALGFIFHKGSYLRNGWNVMDFIVVLSGILATAGTHFNTHVDLRTLRAVRVLRPLKLVSGIPSLQIVLKSIMKAMVPLLQIGLLLFFAILMFAIIGLEFYSGKLHRACFMNNSGILEGFDPPHPCGVQGCPAGYECKDWIGPNDGITQFDNILFAVLTVFQCITMEGWTTVLYNTNDALGATWNWLYFIPLIIIGSFFVLNLVLGVLSGEFAKERERVENRRAFMKLRRQQQIERELNGYRAWIDKAEEVMLAEENKNSGTSALEVLRRATIKRSRTEAMTRDSSDEHCVDISSVGTPLARASIKSTKVDGASYFRHKERLLRISIRHMVKSQVFYWIVLSVVALNTACVAIVHHNQPQWLTHLLYYAEFLFLGLFLLEMSLKMYGMGPRLYFHSSFNCFDFGVTVGSIFEVVWAIFRPGTSFGISVLRALRLLRIFKITKYWASLRNLVVSLMSSMKSIISLLFLLFLFIVVFALLGMQLFGGRFNFNDGTPSANFDTFPAAIMTVFQILTGEDWNEVMYNGIRSQGGVSSGMWSAIYFIVLTLFGNYTLLNVFLAIAVDNLANAQELTKDEQEEEEAFNQKHALQKAKEVSPMSAPNMPSIERDRRRRHHMSMWEPRSSHLRERRRRHHMSVWEQRTSQLRRHMQMSSQEALNKEEAPPMNPLNPLNPLSPLNPLNAHPSLYRRPRPIEGLALGLGLEKCEEERISRGGSLKGDIGGLTSALDNQRSPLSLGKREPPWLPRSCHGNCDPIQQEAGGGETVVTFEDRARHRQSQRRSRHRRVRTEGKDSASASRSRSASQERSLDEGVSVEGEKEHEPHSSHRSKEPTIHEEERTQDLRRTNSLMVPRGSGLVGALDEAETPLVQPQPELEVGKDAALTEQEAEGSSEQALLGDVQLDVGRGISQSEPDLSCMTANMDKATTESTSVTVAIPDVDPLVDSTVVNISNKTDGEASPLKEAETKEEEEEVEKKKKQKKEKRETGKAMVPHSSMFIFSTTNPIRRACHYIVNLRYFEMCILLVIAASSIALAAEDPVLTNSERNKVLRYFDYVFTGVFTFEMVIKMIDQGLILQDGSYFRDLWNILDFVVVVGALVAFALA

SEQ ID NO: 1177 - DNA, 405660 bp, Homo sapiens
  misc_feature (1)...(405660): n = A,T,C or G
tttaagtctcagtttcctcatttgtaaaattgagttcacagtaatagttatttcataagatttttttcgagaattaagtaaaaatttaaaggatttgttgcataaaagccccttatagtatctagtataaaattaagaacccaataaatattaaccattatttttattgatgatggtggtggaggtggtgtctagtatgacccctcatcctcattctaccctactgaattgcagaaaggccttttacatataacccaattgcactgttcacttccccacctcaaacttactgcttgcccaattgaacttaactttattcagtttagattgggtcatttttccattattctgaggattgttagaatactgaccaagaattttatgcaaaagtgaagtctcagtgtccatttatagaggatgaactacaaccaaaaaacatagagagggataagaagactccctcctgctgtgatcagaacaattaaatggctttgtagaatgtggagtatttaaaatcttataattttgcaggtgaatatgggaactccctcaactaatgtgctttggggtgtaagtaacagaaaacctgactcaaatgggctttggccagtaggagctgtattggctcatattgctggtggtctaaggtggggtggcttccgggttgattgaatctggggctccctctccatttcctgtgattttcttggccctgctctcctccatgtggcaggcttatcctcagctggcagtgatgtggtggcagcggtttcacagtttgcatctgtgcagcacactgtccagaggcagagaggggccacttctttttctagccttcccttaaaagctgggagattttccctccaaaaccctagtaaatgttaccttatacttcattggctttaaatgagtcacatgccttttccttaactaatcactggcaaagggatgtggttaccttgactggattagtctaattagaacctgctatggagctggagcccatcccccaaactgtacggacggtgcacaaggttgggggatggaacgatcttgaggaggtaaacataatgcctactacagttttcctttttagatcattggagagatgtgggcactttcaattggattgtaattgttggtctaatcttacaagtgccttgtgtcttattgcagaacgtcagggaacacctgtctgagttgtgcacctggaattgccaacatcgtgctcagtatgcatttattgagctaaaaatccttcaggccacattatctctagaaatgtgaattttgttctcaatgaattctttggcttaaaaagcaggttaattataacataattgttggtaatcatgtcgtaaaatatgtagtaaatgaccagaaagaaaaagcataaaacagaagtcagagggcacagagaagagagtggaatgaagaaaagatcctaaaagctttcagagatcagacacgctttggaggcacaggtatgcccttcttccatttccatcagctcctgagtatccagatcctaacccaagatcttcccactcattgtcaagcttctttgaacttcccacgtgtttgatcacagctgaggtgtgcaaaaaggctgggttctgagataggtcagatggaatctgaccagaaggggccaggcctggcagccagatggggaagagctcaggccaccagcacagaggttcacaactggccaacatgtgaggcactcgagggctgtgaggtgtcctccatgaagaccacattgtaggccccatatgtccagctttgggctttgttcttgtttccctaggtggcaactcagactggctctcccagtccaaaccgtgttccctacttagagctgcagcatgaggggttgcccctgggctagtacctttgaaagcctgtgctgctgttatgaccctactcagagaggagatttaatctgccagcacaaacagtgctgtccataactttactgcagtaccaacgtactccctttaaaagacaatcacctccaagaaaatcacttcaggtaatcttggtctgagtgggtgggagggatattacgaggctctaattggagatccccagtgctactgggattgatacttgagaaatgttttgatagaaaagaggctattggagaagattttgcagcattgcagatgccattgtctgagcctgatgctgcagtggtttggacaaacacccttcagggactatatagaggcttctggaagttagcccctagcccttctctatcccagtctagataactggcatttcaatttgtttctccaagtccaaggggttgtagcattttgttttctttccagttaactattactgactcctagtgacttttccttccagagactgtccaaggagtagttttctgtccttagttttctacctcccttaagttccttagaaaagtatgggaaactgcaaaatatcttctttcctccgtacctgtttacctttctccctctctcctcccctcactccttccttttataagcacttactgaatgcttacaattactacatttctgctctccagtggttaagcagggccaggtgactgaattctggctaatggaatgtggagagttgatatacaccacttctaggccttgcctgtaagcctcatgcaaaatctttcaagtgcttagtctttttctttgtctcccagctggagagaaaaagagtttaggaagactctgaggcccagggcttgggtgttagcaggaccaggtgcctgtttttgtaaataaaaaattttattgaaatacagccgtatccatttgtttatatattgtctatgctgctttcacactgaaaaggcagagttgtgtagttgcaactaagatcttatggcctgcaatggctaaaatatttactatctaaccctttaagaaaaaaatttgcttaacccttccccaggggatggcagagccactgaatgaaaggaacctggttccctgaatgactatgtagagcagagtctctctttcccatcttccaggccaacttgcatcattagacagtgatattggagagaaataagtttttattttattaagctatagatattttgaggttgtttaatacaaacataagttattttacataataaaaatggtagctaatatttattgggcattttttatggccaggtgctgttctatgagcttctgtatttaattctcacaactttatgatgtatctacctttcttttttttctttttttgagatggagtctcgttctgtctcccaggctggagtgaagtggcgcgatctcggcttgctataacttctacctcctgggttcaagaaattctctgcctcagcctcctgagtagccgggattacaggcacctgccagcatgcccggttaatttttttgtctttttagtagagacagagtttcaccatcttggccaggctggtctcaaactcctgactttttgatccacccgcctcagcctcccaaagtggatgtatctactttacatgtatctacttaatctgtaaaatgatgtatgatcattttacagattaagatatgcaaggctatgtaatttgccgagggattcagttggtgagcgtggagttgggattcatacccagcttcagagcgtaggctcctaacttctatttttttgccccatatttacctaacttacagttccaagttcctccccagatactatgttgattcttatcacaggcttctgtagggcaggttatattattatcctcattgtttatgtgagaaaactgacctagagaagtcaagctaaaggttgcttgactagcaagtggcagaaatgtagcctgaacccagagcttctgataccagaatacggactctttcaactcctccgcagagactcagactgacttagtgcacactccatatttgaagctgtgttttccttgagtcttggtttacattcagaatgcaccagcctgttaaattgctgttggacattagcccatccttgaacagtcaccataacaacataggcacatggagaggaatgtggggtaggcaaaaactgatgccagtccaggggagaatagagctttgcagggagtgggggtgggtcagggaacacttcctgggtgtgttttgctatgttcttttcatgatatagactggaaatgattgagaaggacactgttctagtggcttttagcaacctgactcatccaggacaatacctcttaccaacttagcacaacctctcaggctgacacactgcttttaggacagtgtttgaagacatggttcctagggggaaagggtgtctattaacaatgtaggttcctgaacccacccaagatctactgcatgagaatctctgaagagacatccaggaatctgcatttttaaccagcaatgtagatggttctgatgtacattagagattgagaagtgcggtcttaggaagtcatggtaaatgaaaatcatgcccagcttttactcctccttttgcagtcaggtagcaggctggctcagctaagaaaaatccctagatgaatatttatttctgcacagggaatgtttcctctcagagtaggcgggtgagtatgctgagtaggtcattccctgccattcctattgctgggcaggaaacccattttactgtatcagttctctctcaagagaatcatttttagaattaactcaacacgatatataagttgtagagtatcatatctcaaaatttgtttccatcttataacttttaatttctaacaggtgggaattaggacatctttaccctcatccagcctatggcagacagagggtacagagccaagatagctcagggccagcttggggacacttgtatgcctaccactcacctcgtagtgttcatcagttccatttctgtccactatctcttagccaatgtgcttggtggtctatgcagtggagatttctttgctgaactcagaactttcagggaataaagatagtagacttagaaaagcatgagtttcattgacttgctggtgtatccacttctcacaaggtaagttggaggatgcacatgttctggaggaatcagaaagagagtggtggaggggtgggaataggatgggcatgcacccaaggaaaggaagatgaatgtcctcaatgtgacagactcatctttaagggtctgagaggcacagataagccaaaggggtgcatggaccattatttctaaagcagtaaaaaatagatgaattaagaagtaaaactcttgatagggtataaagggaaagatggtgcaaaggacataatatttcttcatggacaaagatcttgactttgactctggaagggtgacagggaagacaatttcagaagtaggctatgagctcgagtgtttttggcagtgcagggtgcttgtgtgggggtggaggaagagagcccttattctgccattccactgtgccctgacagggaagggaagggtttttctggggctgctggattacactaaacgctcttccaccccaggatccccataatttaaaatcacaccctctgctcattaaccaaacttagcaatgaagaataagaagagaagtaggtaggaagcaagggttagagtcagactggtgctctcaaagctttcattagctcgttcttgggcaagttttgcagagctcatcttataacttttaatttcgaagcaggccctcttctccctctcttcaggagtgttgagtgtgagctataggacagcaactttgctctcaggaagctgctcacctgggtccacccctcattctcttttgtagatctccatttcctatttttgccaggttctctgtagaacctgcttccatgggcgtaggctgaatgacaataatggagtccaagagacgcagatgaaagaccaaagtttacaggactttataaataaagttttatcagaacacagtcattcccattcatttacatattctctggctgctttcatgctacaacagcagcgtttaaatagttgcaacagagattgtgtggcacgcaaagctcaaaatatttattttctggtcctttgcaacagagattatatggcatgcaaagcttgaaatatttattttctggccctttgcagtgtttgccaatccttgctctagagagttttgtatgggcatttaaatgctacccttaagtaacatatatcacttccactcacaactcactggccaaaatggtcacatggccccactcaaccatagagggccaggaagtacatcctactgtgtgcccaagaaggggataatcagaatatttggcaaacagcactaatggtcaccataagcacctaatatgaattgaactcagtactaggtgctgggtatagaaagaagaacaagacaaaattgttgatctcaaggaatttaaggaatgccagaatttggggattggagggggaaggctaagtatagattcgagtgtcctttcctagaagatatagactggcttgtctgaattgcttgagatctcggcttggtgctagccagaactggggactgatcggcttggcaagcagtgggggcaacagaccctcctggtgaacatttgtatcaataatagaagggttgtttaacagaaattcttaaaggaaagatgagataatttcatattttgatattcataacataaagctggagctccgcagtgcatattattgctgttgtaattttggcaaagatgtgattcaaattggcaaagtgtctgggaagaggaaatcatgtaaggagagagggtgggatgggtcaggaaacagaggtggggagccaggtactggtggcctggtgagagctgggagggtggcccaggagcctttgtcacagacagacacgagggaaaggaggctgcagccagcagggcctgagaattcttggagttgctggagatgctaaggcctggggagggagtgggagcagcaggggaggggtgtgcgcgtgcatgtggtgagggagagacatttaaacatcgtaggaatgaaggataaatttaaaatccctcaaggggagttgagacagaatgacaacgtgaggaacgtgaatcactctttctagggacccacccagctgttggcatgatttggaatacattttcttctccttaccaagctcattctggactccttatcttccttctccctgatcccttgacctggccttggtggccaagtaccgagtgttggctaccatgtcctgggagcttcaagctcaaaagcattgaggccttagggtgtggtgctggtagggcaaggaagaccagtccagatgctggagatggagaaggggacgaatagagaaggtatcttagggctccaggggcgtccgagtctactgaatgctcccatcaggctttatcatgtatgcgctaagatcatcctctcatccagactttttgtttctatttattatcttagcataacgaggaggggggctgggagaggcatttatggattctgcttcatgtggtagagacactgtgatcaatatagtggagaaaaccataagctaggacttgaaatctgagttctctcccagctctgctttttattggcagtgtgatcctgggtggggctctctacctttgtggacctcagcatccataaaatgatatggttagatcattataattcctaaccattgaaatagtctttgtttttgtgacttgcaatttgacttgccgtccaacccagggaaggcggggtgggagatggtgtctggagggcaactttctgggaggatgccaccctgggggcccagtacagctcccaacacatagtgggtgctcaaccatccaacactggttgaatgatctggaggccagagttcctctgagcatgtagagcacgggacacttcttagatgccacctgtggtcactgagacgtgtggttgggaggaattctggttttgggctcctggctaggagggaggcaataagcaggtatcttgaaaaggtggtaagttcaggccctctcaagccacaaggactccccccagtacttagacctgctgtggggactagcaatgtgtgagtaacttttacgtctctcattaagttaaacctttgctaattggagcatgtcaagatctagtaccagccacccacctggagtgctgctttcacttgggcaggtccatgaggcgtaaaacagggaaaacacctcaatggctttggactcaacctttaggggtgtagtagtggaggaacagtgcacaaaggaggagagaggagtgaccagggaggcaggaagaatcctttggtttccctaaatcctctctcatgcacatgctcttccttttgcctgttttcctctcctgttcttcaactggcaaactctgtttaacccggctccagggtcctttccttcacaaagccctcctgaccaaccccagctgggctaggtgcccctcttttttttctttttttgggatggagtcttgttctgtcacccaggctggagtgcaatggtgcggtttcagctcactgcaacctctgcccaccgggttcaagcgattctcctgtctcagcctcccaagtagctgggattacaggcacacgccaccacacctggctaatttttgtatttttagtagagactaggtttcaccatgtcggccaggctggtctcaaactcctgacctcaagtgatctgctcgccttggtctcccaaagtgctgggattataggcgtgagccactgcgcccagccaggtgtgcctctcatgtgctcctctagcaatcaggcctacgccaatcatagcacattctgtgatgtggtcacaatcgatgttcttcctgcctcttccatgaggatgatgtggactaagtccagctcatgttgttgtgcctagtgcctggcacagtgccttgcacatggtaagttctcagtcaacgctgattgaatacgtacgtctttcagaggccaatctggttatgtcctccttggcatggaaaaggagaatgatgccaaggggagcagcaggggcatctgagtcacacgtggccccaggtcctgaggcaggcacaggcattaaaaaaggaggaaggaacctgcatacaggacccagttctcaagaagagttctccttaggctgggctcagaggctcatgcctgtaatcctagcactttgggaggctgagtgaggaggatcgcttgtgcccaggagttgagactagtctaggcaacacggggaaacgtcatctctacaaaaaataaaaaaattgctggatgtggtggtgtgtgcctgtggttccagttactcaggaggctgagacgggaggatcaccggaccctgggaggttgatgctgcagtgagccgtgattgcaccattgcactccagcctgggtgacagatcctatctcaaaaaaaaaaaaggagagaccaccttgtggcttggtgcccccaggcacgcacttgggaggcagggcagcaggtggtggtggcaatccccccagagtgggccctggggaaggggttagagggattcttctaccaaaaatgggagggaacagccagctagctgtccgaggtggggctgagatgtgcggccctcggagttctctccttattgcagcacctctaaaccttaccaacgcggcatatcattatttctttaatctgtgtcttctgcagtagactgtaagtttatgagggcaagaatccagtccactttgttaaattctggacacctgggggcccagcctggtccgccgcggatgctcctaatttcaacatcatttatcgagctccactgtgtgccagtttgtgggtcaggcccgggatgtagcactgagcaagccagaagccttggcctggaaggcaatgccattaacctctttctttctcttctctatttccctgtgaccttggccccattcttcctccctccctcccttccccactccttgtctctgccctctccctcccacagagcaatgttctgtgatggtgcccgagatgcgtggactgagcccagaccgcaggctgcccgagcccgccccctgcccggctgcggggagccctgagcccaggtccgcgggccgccgccaacgccacgtcctggccctgccggaagaagaggcatggcggccccagcagtgcgctctgctcgaggccgacgcctcggacgaggtgggcatgctgccggcttccccgcgcgccgcctctggcttcgacaacttcttccaggtgcaggagggcgagggccagggctgggagggcgccatggcactggaggcgggctccagccctttcctgccggtgagccccgaggtcatgaagcggcggcgcgggggcctcatcgagcagcgcgacatcatcaaggcccacgaggcgcacaagatgcagagcaccccgcaggcccggcgcaaggaatgggagtgagtatggcggggacgcgggggcgggcatggctggctgggcctgaggtcggggtgggttcctggagcggatgggccccgtgaggccgccctggagggtcgggagatgctttcgctgtgctgcgactaacgagaggctggaccctctggatgaggtcctcgtggtcagtccctgatctcaccacccggctgtaggcctcgtccagcctcactgaggcgttcagctgtcagatgtgggtgaatcagccttgcccccaaggctcacttgttttactaagagcctgtggagaaagaactggggtctgtttcattctctgagctttcctgaaagccagggagaatccttcacaacgtggatcatctatttcatctttacttcaggaactgcagctaaccctgcctttttaatatcctccttggatgaatgattacattttgggcacatctccagtggatggaggaaaatgtccaagatctgtgtggccactcctggctttatttctgctctgtttgtgtagggcaaaaggccaactttaattcacacctgttgagaattttggctttttcttcttaggagtcctaaattaaaggaagatgggatttcacttaattctctcggttgccccaggtttttgctccatagaaggactttgctttgtcctgtggatgccggagtttactcggcatgctggcatgccctgtggtctgtatgtcttcatctcttcttgctttagattgttgacttgctagatgtcatcaagtacaaagagattagtcacagatgtattttgatggtggtggtcgtggtgggatttacctacttggtttcagtgaatgttctggatgatacaagtaggggtaaatgagctgatctctgtttcataaggatgttaatgtttgttagttcgctcattcattcattcagtgagtccgaatgtatgccgggctcctgggattcagagaggagttgggcacagccagcattcaacaaatctcttggttgttcatctctcagcactattagtatttagagccttgcatacctgtctttaagtgccaggcaacattccaagcaccttacatatatccactcatgttaatcttcaccataactatgaggtaggtacagttattagccacatgtaaccaatgaggcacagagaagttaagtgactttctcaaggtcacgtggataacaaccgcattgttactgtgatttgatattaattagtaatttgaaccctggcagtctggttgtggaatccatgcctttaaccatgatggcacagtgcctttcattctaactctcaaagtacttctctcaacaacctattgagatgccatggtaagagcactggtgttggggtttggagacttgggtctaattcccagggtgacctaattagtggtgtgaccttgagtaagtcacctcatcatgacttcgaaagacaagtaggagggagtagacttcctttaaatacaatgcagctctgatagctggcctttcttcatatttagaagtactattttttaatgcacctccatcttatctttctaagaggaccctgaacaacttgagggctgagactgtcatgcacattgttcatgtcactcaatgcctatcatctggcctaacccaaaaaatcccacaatactcaatgaaaaactagctttaccatgactagcaatgtggaaataacttttatgtctctaagttaaactttactgattggaggatgtcaagatctagtaccagccacctacctggggtgctggcggggatgattgggagactgttttcacttgggcaggtccatgaagaggtaaaccagggtacacacatcaatggccttggggaatgtcagcctttaggggtgtggcagtggaggaagagcacatgaaggaggtgagaaggagtagaaggaggtgggagggtaaccagagggtatagggacaaagaagtaaggaaaatggtgtgttcagaaggaaggtcatcatctccatagaatgttgctgagaggtcaaataaaatgaagatagagaaggaaacactggctttggcaacacagagatgacctgaatgggagtagtttccacagggcgatggggtcagtagcccagttggagtgggttgaaaagaaaatgggaagtgatagagacagtgatgttgccccatccttctctgctccccaacactcacggcctcatcatggcttttcccctcaccacccaaattccttagcctcatggctctgtacatgccttaatttgatcttctccacacccctccccagttctacgaaccctaatgttactgagcaaagagggcttgctgctcggggcactagaagccaatactacagcactgggtttttgagaagagaagctttttattgcatgtcaattcacaaagagacgggatgtcaagcccaaatctgtctctctgtcctcgcttcaaggcagtattttcattagaaaaggttcaagggattagtaagtgattggtggagggaaaggggaggtctggaaagtccttggacatgctcagttatctcttcatgctacctcacaggtcgcatgtgaaaattcttgaggacttagtatgaaacatgtcatggaagttcaggctgtggtgtcagcaggcttgttctgcagacgccagtaggccaggccatcttggttccaaccgatgtcagccagttttttcttgatctcacgttgtggggaatttcagcatttctgcaagttgtttcttttcttatctgccattctgcaagctcaagaatatctgttagtcattggtttcttactctttggggcacagtttcagcttcagcttttcagcaggttgtttcttttcttatctgctatcctgtaagccaaagaatgtagtcattggcctctttaactctttggggcacggtttcactaatacactgtctggcactcatgtttcatcatcagcaaagtcctgttcatcctcctcatcttctctggaagtccccttcactctcttatttctgctggagcctccccccaggaatgcggcttgctctgcagctgcctcatgtgacagctgctttcccttccacgctgccttggaccctggagtctagagaagcaatttgctcctcactattgcttccagaccattactcccctctcctgtcctaaaaatgccagctgtggcgtgcatgtcatcagataataccacctactacccctcgttgccaccatctacaaactcccaagtcacttgcttcattccaggaagaatgggttagccctgggtttactgcctctcttccccacgtcttcagctgctggcagttcttagtgatttcagtatccatgtagatgacccttcctgcaccctgacctcttggttccttagccccttctgtttggtgactttgccttcttgcttcctgctgacagctcacctccatggtctgcctggacattgtcgtaactgcattactccataatctcggtttcaagcatcccactgtgtgatcaccccctcttttctctccactccctctagtgctcagttcccaagattctttaatcttactgcatccacaagacactgatcctattaccttttcactatccccttccccagtcatgtcaccatttcccatcttatcaaactgaactccatcataagcaccaaacatattttccagataaaatagtgacctttcacttgaagtctcctcctaccctctcaagctctttcttctaccaacttctaagatagaatgaatcatccacaaagggcaagaatgctggagctcaagttggtttctagtgtacttcatgcttcaccatcattataatctccttattttcaccctcaactttgttgtccctctgctgctttgttataccttgtctggcaagacttcagccctgctaaatcccactttcccctattcttcatgtacatatgggcaggtgaccatagctatagaaaaagtcacaaccacgccgattgacctcactgtgaattgatgactgccacctccagttggcccttagtcctgcccagaaatcttactacttttcccttttctattcactctcacactcctctagagattatttcacatgcttttcccttaactctcaaatcccatcatttcctgccagctcgctcctagctcatgactacaattgccttcctacttcactgggaaaatagcagcaatcaggagaggcatgtacaggctccatccactgcactgaccgcctgctgcatctggtccctggtaccaggcctttaccttctgttactgtggactgaccacccctcaagttccatgtggagtctgttgcccatgtagagaaaaatgagcccctttgtttattctgtctccatttttttttcttacaattttctctggaacccattccaatcaggtctttgtcccaggcaaacaaacagctgttgacatggtgacattggccttcccaaggcagaatccaatgggtgttccttcgtgtccatcttccttgacctagcagcaacatttgatcacttcctctttcttgaaactcttttgtccttattttttatattttatgtttttttagagacaggattttgccgtgttgcccagactgatctcaaactcttggcctcaagtaatcctcctgcctcagcctcctgagctaggagtacaggtgaaagtgttttgtcacatggcttttacgatacccactcttggttctcctcctatgttgtgggttgcttctcaatctcttgctagtttccacttccttttcccaatccttactaaacactggatgtcccagggcttggtcctcagcctgttctcttctcaccagtgcttacttcctagtgctcttgcccagtcccagacctttggttagcatcgtatactgctgacctctaaattggtgtctgtactcaggacctcttccctgaatttaagataccacccacttattcaccatctttacttgtacatccatcgacatctcaagctgaacatgtctaacatcaaaatattgatttctctccaaacctgcttctcttgtagttttctctttcattaaacctacattttttctgttgctggggccagaaatgttgaagtcattttgattctcacattgacactcaattcttgccaatccccagtgtctcccccctcaaaatgtatcagatcaccattcaccacctctgctgctgtctccctggtccaagcaccttttattatttttattccacacacgtatatgatactagatgcccagcactattctaggtactttataaatattaattaatttatccatgtaataattgattgaagctggtaccattattaccattattgtccccatttttgcacttgggggatagagagtttaagtcacttgcccaagatcataatgtcaaccacctcttaatgagcctccctgcctctgcccctccctgctagactctgtttccccaactgcagctaaagatccttactttttcttttttgattcacaaaggatttagaaaggtagaacaagtagtttctgtccaagagtcttaagaaatatttcatatcagtccttagctcagtgcatgatttccatcttctccctcttccccctgcccagccagcctcctaaagatgcatgaatgtctttggtttgatttcttcatctttccccttaactcattctgcactggctacactggtcccttgttatgccttgaatgtactcagacctcccacatcaggcctctgccttttgctggtccctttgcctagaatgcttttcccatttatcaggatggctcctctctcatttcatttaggtttctgctcagagagaacttcctgatcaccctatttaaatagcattcccccattgtcactctctttccctctttattttgctttatttttcatcatagcccttattgtttccccaacggacacacaaacacacacacatacatacaagcacagatattttgcactggagtgcaagcttcttgaaagcagggcctttgtcttaccttcagggtccaaaacagtgcctagtgtgcagttgactcacaataagtgtttgctgaaagaatgatgaagtaaacatattgaggggaattgatatccattctaatcagctaagttccagggaaggaggcagctgagttccctgtgtccactgtgtggttgtacaggttgctgactgcagagtcctccagttgaatagtcagcagtggaagtggggagtctgttctctgccccacttcagggctgcccaggatctgcatgcactttgtagagatggaaatttttcctcccttctgtctcctgcctttcagcttctcctgacttatgttctttagacaggatccctttggctctaggacaggggcagcctggtcctttcccagggcttggatttactgtagtgggaaatcaggcagggttctctgtgggcagccctgacagcatcttgctcctcccaaggccctgtccactgcttatacaggtgaaagcctgggacacataccaccagctttacaaatcctgtctcctagacactgagtcaggaccctggtgatagtgaaacagactagaaaccaacctgggaggtctcctgcattttttttttgtctttggctgggtaagccaaatgctgatgggagaaggagtactttaggtgatttcagatgaagcagattttcttgtacagaatgttgttttcctaagaacctatttaaaggtttcctcaggcccacttttcaggtgatgaggacctcttggttagcaccaagtgtttattgtgtactaagttttataactttagcaagtgggcatgtcacaatgttttactaatactttaatatagttctctccagcttaaaacatttttcatacatatgatctcatctgagcctcacaatgacctcatgaattagctgttattatttataatttacaggagagaaaaatgagctccgaagttagaggtggtactaggtcaaaaacctatgtcttgataatgactgccaccatttattgagcactggctatatggtaggtgatttgcatgtattatttattctaatggaaataataggtaccatgatgaagaacagaaacattttgtatggcactattattgcatatgggtctggaagaaaggaaattatgtgtaactttaaagtctgcgtaggttggtatgacttactctataaagagggagggggtatttccataatcatagtacttagcacactacattgtaattgcctgtttacatgtctgtgtcccccactagattgtaagcagagaagtctgtctgctccccattgtgtctcctttacttagtactgtgttgggcacataataggcactcagtagacatttgcagatgaaaaacaacaacaacaacagcaacaacatgatttttcatattgggaaactgaggcttgataaggttaagttacctgcccagtatcacagagccagtgaggattcactccaggtcctctaattccgaagcccatgtttgttctactgagccatcctactcactggtgtccctacagtaactggcacagcactgggtaaatgacgggaactcagttcatgcttgaattcttgcaatgctacttgtaaattgtgggcttgggcactttgtaacctccgcattttttgagtagaggagagaaataatacctaccttgcaagcctgttgcaaagtttgaccacatttattagatcatatagtctggtggggggtcctcaaaatgttgatgagcaccagggttattctgggcctcttctctgcctacagcctccctgggtgacctcaccaggtccacatatctgcagatgactctcaaatgtaaatttccaaagaacccttgactcttgaagccaaatgcttgtctggcatctctgcactgttgtctatctaatcagcttctaaaacataatgtggctagaacaaaactcctgatcctcttctgatcctgtctggcccctcatttttccttatctcagtaaatggcaccactatttctccagttgtccgagccaaatattctcattatcttttatttctctccatttttcctcacttctgatcagtggtaagccctgtcaataacatctcccaaacatatcccaagtccaaacacttctccatccccactgctaccaatctcttccaagccactatcctttggaccattgcaatggcctgctaacgtgtctttgcatctttgtttccctagaataagagaatgtgatctattgacacaacaggcagggacaatatgaactctttttgctggctcataaagccctatccgacctgagctttgcttaactcctggcctcatctactctctcccttgttccctgtgctcctgcccactcgccttttatttaggctatgcctgtttatgtctctaccctggctcctgccgttgcctggaatatttctccagatctcaacagggttggttcattcttgccatttggaccttagctcaaatgatacttcctcagagaggctgtccttcatcacacagtctaaaatagacacctggtcactgtgccatatcacctatgcagttgaccaccaacccccacaagaatgttggtgccgtgagatcagtgatttgactgcctcgttcactccatatccccagtgctgagggcaatgctgacatatgggccctcagtaattatttgtgaatgaatatttatgaatgttccgtaacagtggctatggttatagttacgatctatgtgttcacctggcctctgatagccctagccataccaaacggtctagtccaggaagctcaggacaccactggctctaggtctagaccagggtcagcccctggggtgtggagattcatgagctgtaaaacacaggttggttaacttacaggttgtatgagaactgtcctccttcaagctattgtttgatcaccacagagccatgtcttatttgactttgggtaagatatccaacctttgtgggcctcattttgctcttttgctagattgtggatgagtacagcaacctttttgaattgttatgaaggaaaaacagcatgtaaagtacttagtccgatgcttggttgtttttctccttgatgtctggttcctcaccttcaggagcctgtcacttgctatcacttatagtttaaccaaaacattagattgtgaatctaacaatagaagcctgcaacttcttgtctaccgagaaagtgtacaagaactgctaactcatgcccccatgcctagcaacatggctttctcaactttgaaaggattagagtcatccgttggtcttaggaaccaaaaacattgatgcaactccaaataaaagtagcaaacatgtatttttccactaccataataaccctaatccccttaatcttacccatcattactaccttagccaacccctataaaaaaggttcatatccaaattacgtaaaaacatctatcgcatgtgccttcatcatcagcctcatccctacaacaatgtttatatgtacagatcaagaagtcattatctcaaactgacaggcatcagaggtttgccgaagcccaaggtgcagaggttgtagttaggcttgggatcagctgtatacatcaacggaccacagcagcatgtgggagactacaggagggaatgcacagtgcctggcacaaggtcaacagtcagtgcatatgagccattattatgatcattattattattcatctggtctagctgcttcatttacaggtgaggaagctggggtcctgagagcctgggtgactgctggtgctttatgtgaaggtcagtggactgtggtgagtgacaaggtaggaggaaccagtcctgcaagtcccacccacttctgtctcatgtgccctgcagctatgctgacttagtaggggtgatcacattcaaacaacagtctcactggcattcacaccgcattcagcatcagcaacatattctgtaaggcaacacctgtctcaaccttgaagctttatgggtgaatttaagggccattgggccaattttttttttttttttgctggccttttgaaaggcggccagcctcctgcagatctagtgagactaagtggagacctcagtccacatgctgccacctgctgccagcatcagacatcactcgggttgttagaatacaggaatctgtggaaccactattgccaaaagggtgcatggcagaatttgttcttatatatgagtgctttgttgaattatcggatattttaattttatttaaatgtgtatgtttttagagggggcaggaagtctccaggtcactgtattccccaccattccctactgccttagggctattagaggactgacttggtcctgaaggcacctgagtttgcaggtctgcaaaatccaaccttctcactcagagacgaggcatttcaggatcctagggctgtagtataacagggttgcagaaaccaaaacatatgccagtggaacacagaaatcatgagccttcaacacactgggttatcactaaccaacagcaagtttgaaaaccaccagccaagaagagaccggagcacatgccctgctttcttggaattctgagcagagcaggaaggtgcagagaatccagagaattgggcttcccttaggaactgacacaatttgggtgatttctagagatttgctttaagatgatcctttggggaacttcagcacacacccttgaattttccttacctgtcctcccgggattagaaaaaagaggctgtttctagatctggtctctggtgactcgcctttcccttcaaccttccgcagttctagaaatgcttccctagagaactgggtttgagaataaacaaggtggtgcgcgagcagcgcggttttctgtgcttgcagtggagaccgcctgtgacaaggagggtcctgtactgggaaggagggggactggccccctgctaagtgcctggcgactctcatctcttgcagagaacgaatgcataacctctctgccactccctttctctttctgaagccattggatgccctgagagaaagcagagggtttccatcttttccagagcacagtgctgggagcaagggctgggggagatctgttgtcccagttcttcccttctaaggcaggccttgggggaggactctcccccaagactctgcagcctggtgctcaagccggatcggcccgttctgtgcttccttttgtggcaccatcagagtctcctccctgtttggaggctcaggtgaatcagtcccctctctcccaccctgcccttgcgctgggctgcctccactctgctcccatggccatatctgtagaaggaggctcttcagtcttctgaacatgtcaagattcggaaattctgcccccagccacctttttgaagaaaatgggaaaagcggcgccctctagcgccagctgctcaatttgttttccctctttttcagaagagatattttttcttcttttatggtgcccccaagtggttgtttctgtgtattgcagccgcagtctcactgggatgctttccgctgtgtagctggaggggctggggcagcctggtggtcagcactcacatcacaagaaaggaaagcgaagccaggaggagaagggccttggcagggcacgatgagcgccccgagactcccaccgcagtccagggccttccccctccctgaccactggcaaccccttgccatctttaagggcttgcctggacccatggctgcaaatgagccaaaggcgttttcctcttggatgtgaggggatgggtgaagacacgtgcagaaaaggaagtgctcattgtggaggaggtgaacataattggaggaattcgctttggcctttttggctgaaaaaaatatttatgaaattgctgtacacccccgctcccccccccgaccccaagcagagttagacacctatagaattccaggcaccgatgaaaagacctttaaaattaatcgcacataacttctcattgaaggtgcaggtgagaaggctgaggcgcagagaaggaggtgggcgtggggcacccttctgaggaccccacctcagccgctcataccccagccacactgtcctccttctcttctcttctgcttttagctcctttaaccatctttctcttcctctttttctctcgaagcctgtagcagggagggaatgaaggcatgcagggttggcgtgtgagtgaggaagagggcttgtccccctttcccctctgtccctgcccccgcctctcctggggacctccttgcagaccctctgcagctgtgctcacatcccactactcagcctcactgctgttctaaaaaggcagcattactgcctgctgatcaggtgatgaggaacctgcaacccttcccaaatttataaagaaaacagaggaattcagtaaattctctttctgctcttggagtaggacagaccagtggtcagttctggggacagtgctcctggtgtggagacagtgttggctggacacacccagcttgggtgcactggggtcaggtggtcaggtctaactgcatccccctcctgtcactccatctcaacaattccccaacccagtcctaccccatctcaacccttcctcaacccaacctctctccatctcaagtcctccccatttcagccactatccgtctcaagcccttcctatgtcaacccttatcaattaaactcctcctcatctgaacccttccctaactcaacccagctcatctcaaccccttcccatctcaaccgcttcccatctcagccacttcacaactcaaccccttcacaactcaaccccattcccatcatggccccatcacaactcaaccccttcccatctcattcccttcaaaactcaaccccttcctgtctcaaccccttcacaactcaaccccttaacaacagaaccccttcccatctcaaccacttcacaacttaaccccttcacaactcaatcccttcccatctcaaccccttcccaactcaaccccttcccatctcaaccccttcccatctctacccctttacaattcaaccccttcacaactcaaccccttcccatctcaaccccttcccatctcaaccccttcacaactcagccccttcccgtctcaacccctgtcaatctcaaccccttcacaactcaaccccttcctatttcaaccccttcccatctcaactccttcccatctaaaccccttcacatgtcaaccccttcacaactcaaccccttcacatctcaaccccttcacaactcaaccccttcccatctcaacccttcacagctcaaccgctgcccatctcaaccccttcacaactcaaccccttcccatctcaaccctttcccatctcagccccttcccacctcagcttcttcacatctctaccccttcccatctcaaccccttcacaactcaaccccttccttactcaatcccttcctatctcaaccccttcacaactcaacccctctccatctcagtgtctccccaacttgacccttcaacatctcaaccacactcatctcaacgcctccctatttcaccctctccccatctcaagcctacctcatctgaactctacccatctcaccacacccatctcaaccctcacccatctcaacctctgccccatctcaacctcactcatctcaactccttccctatctctacccctgcccgtcccaacccctcccatctcaattccaccgccatctcaactcctcccccatcttaacccctcctcacctcattccttctccatctcaaccccctccacctcaacttctccctcatctcagcctcttcctcatcctaacccctcccacctcaacccttccccatctcaagacttccccatctcaactgctctctacctcaactcctcctccatctcaacccctccccaacttcaacccctcccccacctcaactcctctccaacttcaacccttcccccacctcaactcctctaccattgcaactcctcccccatctcaactcctcctccatctcaacccctcccccacctcaacctctccccatctcaactcctctctcatctcagcccctcccccagctgccatctgttatggttgcttctttcccctgtgtttatacttaagctgggaaaaattccccctccctccctccctcctccccttccctctttctgtgatgaacatgaaattatattacacatataggtctttgttttgctcttattcttttagtttttaaaaattacaggatatggtgtgcatctttctttggccatttctggaaagatgtccataacatctctttcacgctgcagagtattcctcagcatgactgaaccacagtttattccagcaaccctatcaatggatgttcccagttgctttgcagttaccagctgtgctgtagtaagcctcccctacatgcctttaggatgtgcactttcatttctgtagggtcaagtcctagaagtgggactgtggacaagtctttcccacgctatgccctcactctccggaggactggcacttctctcaacacccctcctcagcatctcagcctcaaattgaaatgtgaactttcacagtctgtgttatctctctggccccactggagaggcccgatgaattaataatatgccagcaggaaacagagagatggagttattaattgtcagtccatgagcccaccctctcaaggtcctaattagcatgctgacagcttcggttttatccagagctagggcaaggctctggggacactgtggctcagctaggggcatccggcacagagtggagagccctggtgcctttctgggtggggtggaggggcgcttgcaagaggcttgtgaattcagaagttccttcagggatccctttgtgcctgctgtggggtaggggagagaaacaggctgggagtgggggcaggaatgggagttttagtgtccaggtggtggtgatggttggtgtgtgctgctcttgggccccagtggtgggtttgtgattctggttctgctgcaggacagtgacactcaccaagctgtgttgggtgtagttgtctcagggaggtgcctgctttcaaaccaaagttcctttgatggggaggactgaccccaggaagactgattgcgtatcaatattactctaacccatggccctctttcataacatgcacactcctggaaaggatatcattaaatctggcattggtgcatggccaggctcacatagggttgctcaagaaatgttgctgtaaaggaggccgggtgcggtggctcatgcctgtaatcccagcactttgggaggttgaagtgggtggatcatttgaggtcaggagttcaagaccagcctggccaatatggtgaaaccccatctctactaaaaatataaaaattagctgggcatggtggcacacgcctgtaatcccagctatttgggaggctgaggcaagagaatcgcttgaacctgggaagcagaggttacagtcaaccgagatcacaacactgcactccaacctgggcaacagagtgagattccatcttaaaaaaaacaaaaaagaattgtttctgtaaaggaaactacctataggaagctgcgtgaccttggccaggcctcttcacctctctgggccctttttaatgtggattagaggtggtccttattttggtttgctccatactgggcagccagaaccatctagaacaccagccaggacttgctccccaagggtgctcctctgttgcggtgcctgcctctctgcccaatctctctccacacagtggaggctctgagtctttcctactttgagccctcatctccaccagcatctatgcgtagctctgctgtctcaggcgcctctcaagaagtttcaggcagcagagttggtggaagctgaaaagtcatttgaattagtttgcctgggtctattgctcaggagcctgggcacatctcttaacctttctggggctgaggacaccagcattcagggttgtgtgtgaggtgcttagtatgattattactcatgtttgttattaggctctgtcctgcttcccccaggctgtggccgggaagacagaacagccatttacacagtaagctgcccaatgaccctgcctttcccattcccagtctgcttttaaaaaatatgggtgtctagaccccaaccctcaaagattcagatcagttcatcttaggtgaagttttaacaggaagatgtatatagatgtatatattttacaagctcttcaggtgattgattagtttaagaaccattgattgagacccatggcaactgggcgggcaggtaccttgtgctcatggggcctgcccagccagacacagcctttttcaggagcaaatccccctatctcccttttgggacacagcagactgtctgagatcatctgatgacctctacatactcttttctgggactaagctgcctttctggatcagttagaaggcaactggaacatctctgaaaggttctggatctctgtgcacatacagtaaggggacagagctcattctgtgacagtcttaccaatgcaccacaatgtagcagtctctcgttgtaaggcatcacccggagttcttcgtttcatgaccaaaaaaattaaggagtgtggacaaagggtgaggttagaacgaaagtttaataagcaaaagaagaaagtcctctgccacagaggggacccgaaagagggttgcctttttacagttgaattcaaaagcttttataagaaactcccctcatctctgtagctgtttgtgtaattccccttatctgtgcagctgcgggcatgtccttaggcaagcacaaagcacagcttctcttgttcgggttactgtggttatgttttgggtaggtcccccacctccctgtgcaagttcccatggagcccactgtgtacatgcccgaaaagaggaggaaacctttctgtgggagcccactgattacaccaagaacaaaggctgctatgttgggccttacttgcttgtctgtgcagctgcagcctgagttttccccaggctgctctatttgtgcctgtagcttgatttttcaggctgtctttcattttgaaagaattttaccaaagacaagctttagctgtctgcccaactagtttttccttttctcctccctcaactggatcataacttatgactctgaggctgagtcctgggatagttggatgtagagggggcattatctggatttgaacccagtaattcttagctgtctgatattacataagttacttagccttcctgaacctcactttcaccatctataggacaatatgtgctttgcaataataacattagatttctagaaacacacacacatgcataacaccaggaacaaattttcctataacttattttattgatttcttttacatatatgaaatagaaaaatgatattccaaagaattatacctctcaattttttttaggaaaaatgtttaaaaaataaaaaaaaaagaattcaaattgtgcaagtaaaacaaaaggtaaattggagctctgctttaaagtaaatttcaatagaagattgttgttgttttctttaagtaagaagctgaaattgcggagtgagttttgatgtggcagtgtgtatgctgtcttggttatccagctgttttgactcggttttgatggcaacatatactgaccatgaaactcagaggtaagtaatttcaccattttgaagacacccacagctcttgacattttcaaagggtggttcccaaaataggagttcttttgagatggcattggtatattccagggtgatggatgccagagattggctgggtggcttgatctgggttgcagacagttaaaagttaaagaaaagtagggtagcttctacttccttcatgacctggtccaggatattaacagacatgccagtggacctgggtgcttgatgttacttaacacaggtatcatttccactttttccctctgctccaagccacagggaaactcagccatttccagggcccttggtttcaggaaggtctctgcagttgcatggagcctgctttgcctggcattctgcaggattctttagtacaaggattttgactgggtcaaatcagagatttgggcaaattcctgcattttaaaatagtcttctcctaaaaccctttcattctatgtgatggacagataagagatacagggctcctgtatcagaaattttatttgacttttggagtagagtgacctgaagaacaaattgcagttttatttttctcattacagcaagtcaggaggaggcagcctgggcctggtggggcacttctctgatgtcaacagggtctgcccaccctgccatctttagtgtggcttcctgcatcgccgatcgaccaagtggcagacctgagggcaaaaggaagcctgatattggagtcagccccctttggaagaactttccctacagcccacctagtaacttctgatgatacctccttggcctgatttaattcagtgcaccaaaaatattatcatttcaacacaaaaccaatgcaaacaaagaatatgcccctaaatgaaatggtgggatctagtttaatttttatcaagagaccttcctgaagccaagggccctggaaatggctgagtttccctgtggcttggagcagagggaaaaagtggaaatgatacctgtgttaagtaacatcaagcacccaggtccactggcatgtctgttaataaaaaaattttttaatgttttcattcatgtatcgtttcaactgaatcacatgtaccctaaaacttaaagtataataaaaataaataaataaaataaaataacaaaaaaatgttttcacaaagacagttttcaaagtaacaaaggacattgagaaaaaaaatcctttggttgttccaagtgtacagaacatcagataaaaataacatcaattttccacagagaaaccaaatatgtcatttaaatgcttccagaattaaacatttgatgtgtatgttgggtgaggaggcaacaggattggatagggtggtgggaagtctgagttttggtctcccctctctcactaactagctgtgtggctttcactaaacaactccagccccttaacctcactagctcagttttatcatctgtaaaatgaaaggattggtctcgatcagtgctgtccaataaaaataatatttgagccacctgtataattttaagatttttagtagccatgttaaaaaagcaaaaggaaacaagtaaaatcaatatattttatttaatccaatgcaccaaaaatattatcatttcaacacaaaacaaaattattgagaaagtattttacatttttttgcactaagtctttgaatgctgtgtataatttacccttccagcacatctcagtttggactggcacagtgtcaggcgctcagcagctgcacacctctcctggctactgttttgaatggtgctgccctccagagctccaaggtttctttcagtcctgacccttgaggattgtcacctttttttcttgactcagctttgagtgtcttggcctctctttccatcccccaacctggggcttctcttcaggcatggggtgaagggatcaaaaccctgagggccacccccactccatgatttctttctgcactgtctgctctctgtcctgtgctttcctgatttggaatcacttccctcgctttttctcaggctgagatccctcccagcttgccttatctctgcctggtccctgaggtaacccatttgcagcctcccattcctgctctgtctaggccatttcatgttctcttaattttgcattccattgcctttaaaatcttcaaccacttaaaaatgtaacaatatacatttttttctttcattacaaaagacgtgctcattgtgaaacaattgggaaatataggagcttataaagaataatataaaaatcactcataatccactcactccaacccaaccactgctaatgttttgatgtgcttatctttggtctttttctaagcattacgtatacatgtaaatgtgttttaaatttctttttctggagattttacagaatatatagttttctattctatttctttcacttttcattatactgtgagcgttataacaatatcattaagtatcgtttgaaaacatcatttgtaattgctaatggctgaggttcagggagagattttgataatattatgtcaccattaagctagggacttagataaacttagtatctgccctgcttctcattcctccttgttgaagagctcttgaccaatgtaaaaagcaatagccaaatgtgaaataaagaactaccttattaacagctcagcaagcactggagaccggcatgtttgcatttccacgctcattggtctaggtgaggcttcctggtccccatccctggaatctaagatgagctgggcttgtggagcaaccttgggcttgactttcctacttggctcagactggctttggcaaattgcttaaccgctctgggtatgtccttatctgtaaagtggtgattataatagtgctcacctcataggtctgttgtgcaaattaaatgagagagacatataaagtgcttatcatagttcctggcagatagtaaatgatccataaatgttagttttaccatttccctatttttggacacttaagtggcttaattttttttactattataaattaatcagtttatcagtaacaaatatttattgagtacttactactggccaattttttttttttttaaatactagaaattacaggggtaaccaagaccagacaagtgtctgatctcatggaatttaaattttaatgggagacatgatcaataagcagggtaagtttggatatggaaaaggctatcaatcacatacaacaagatgatgccctgagcttcaggtagggtgggcagcgaggagctttctgagttaggtgatgtgtgagcagacatctgaatgacaagggggagatctggggaagagcaagttaaagaccttgaagtggaagtgaacttgaggagttcaatcaaaattcagaagcagggagcgcagggggtttggtgtggtgggaggagctacgggaggtgggcaggagccacctggtcagggaacacttcggagctcagggtgaggactgtggacttcattgcaaggtgtgagacatgcactggaggcttccgtgcagcggagggatgcctactcagtggtgtgctggagcgggctcatgggagcttctgagagcctcttggcacgtctcttcccagctccttattcagtgaaatcatgttgataagtggcttgatctgggttgcagacagttacagattctcctcgatttatcaggacacaatctgatcaacccattgtaagtgaaaaatatcatcagtcaaaactgcatttaacaccatctaaacccttcctaaagtcaaaagatcataagtcaaaccatcataagcccaggactgtctatatttataacacaggagtttatagcagatgctactcttcccctagagagctagttgttaaatgtttaccagcacaccactggaacaaactaatctaggttttaaaaaattctctttgcctatgctctgtgaagaatgaattacagggaggcaatatgcagttttgactgtagttttgagaatttccttaggataaattactggaagtgaaattactacagaaaattatctaattgctccccctactgaaaatgttcatcatttatacctccactagcagcaaggtaccatttccttgtactcttactcacacttagctttagccacccccatagaatgttccttctatctagaactttgcattctgttctctatgtgtagctgattatttatttatttatttattaatccttcaggtctggtctcacatctctcttctcagaggactttcctgaccactctatttcattgtaattacttatttgccagaaccatggccatttatttatgtctaggacagggtctgccacatagtaggctcccaatatatattattgaatgaatgaatgcatccgcctacctttctgaattctcaaattgatactaatacagtcaaaggagttcctttccttggaatgtctaggattggcttttttcagcttaatgatatttctggagttgaggtatattaagtccaaagagttcaataattgataacaaaatactgtgcaataacctaacattataacaagatattttgcaataaaatgcagctttaaaacatctgttatccaagtgaagtgatgactcacagagaaaatatttccaaaccatacatctgataaggagttaatattaaaaagatatgaggaactcaaacgacttaagagcaagaaaacaaataaccctattaaaaaatgggcaggggacctgaacagacatttctcaaaagaagacacacagatggccagcagatccatgaaaagatgctcaacatcactaatcatcagggaaatgcaaatttaaccacagtgagatatcagttcacacctgttagaatggctataataaaagagacaaacaatgaatgttggtgaaaatgtagagagaaggaaattcttatgtattgttggtagaatgtaaattgatacagccattatggaaaatagtatggcggttctttaaaagctaaaaacaggactaccatatgatccagtagtcccacttctgggtatatatccaaaggagatgaatcaatattttgaagagatatccacactcccatgttcattgtctcattattcacaatagctaagatatgcaagcaagctaagtgtctatcaatgggttaatggattaagaaaatatggtgtgtatacacaatgaaatactttcagccttagaaagaagaaaattgtcatttgtgacaacatgggtgaacctggagcatattatgctaagtgaaataaacaggcaccgaaatgccaatatcatatgagctcacttatatgtggaacccaagaaagttgaactcagacatacagagtacaatggtggttacagaggctggggacgaggggggtggatgagaaaggggtgaggttgttcaaagggtacaacattttagttagacaggaggaatgtgttttagagatctgttgcacagcatgttactatagttaataatagcagattgcgtatttcaaaattgcgaaaacagtagattttaaatgttctcaccacaaataggtatatgaggtgatggatatgttaattagcttgattttatcatgtaaaatctacaatttaaatatatatgaaaacatcacattaaaccccataaatatatacaattattatgtcaattaaaatgaattaaaataatagaaaacccccaaaaaagcatgttatccattaaaacacgaaaaaccaagagccgtcaataactgcatgtttctagtgagactacagcaatttctctgtgcacttgccagaggcttctctgacatgtggtcaccctggagcccatgcaacaccctcttattgccacagacttctgtgctcactgcatggccaatatgtgtagactaacttctgacagttttatattctcttttaaaattttccacatttgctcttgatctcattctttcttttttctgtgctataaatttctccagctctactagatcatcccaccagtgtaaaaacatgcaatagaatgtcacatataagaacaaaacacaagaatccttgctacctcatacgcctctttatcctcggtcccatttctctgctctcctgtatagcaaaacttctcagaaaagtggcgaatgttgtccccactttctcatctcctgcccctcctaaccactctaacaggtggtctgctcacaaaaactgctcttgttcaggtcattagtgatgcccacattcctgagtcccatggttctttctctgtctttatttgatttgacttctcagagtacttagactctcattcttgaagcatttgcttctctggcttttgtggtagcatgctgttctagttttcctatttcactggctgtcccattccagtctctgttgctggttcttgctcctctgctatacccctgatgtaggtgtgccccagggctggcttctgggccctcttctcttctctgtctatgctcactcccaggatctcacccatttttgtaggtttacataaatccacatgtaaatgactcccacatttatagattcagccttcatctctcctctgagctcctgaggctgaaatccagctgttcccttgacatcttaactcaggtgtctaatgagagtcttcaactgaacaggtccaaggaacttttgacttatgccatcctccagtctattcctcctcatgtcttcctttccccacaaatgacactaccatctatggtgtggctccaattccagattatactaaacagttaagggaggtgtgtggtgagaatggtggccatactcccttggggtgctgtcaccaggaccagtcttgagcccagttcagccctccttgtttagtagcatatgtctcagaacatgatatgcacggccacttccacccactgctttcacttccggccccttttcttaggagttttggtctcataatggctctagaagcagaggaactgaaggctagagtgggcaaaagtattctctctacttccaaaattatattcatgcaagagaagttgacttcctggttttctgggtagtacaatccctaggtccatatgatgtggagctggaattgtggatggggaatggtgcatttatggaaattctttcagggcagtaggtttgttccaattccattctcatttttaaaaataccatttgcttttgcctttttatttttttaaatcatcaggtggggagtgggaaagtctaaatcaaagactgtcattcagatggtattttaggctagaaatccccaatatagaaatacaaatataaacaattaggagaaatttatttatacccatgagaatggcaaaattcagaaaggtggatcataccactcttgtcactgatgagggagatggaaatttgcacgcgtacactggtgggagcataactggtacgcttattttggaagaatctagtgaagtgaaatgtgtgcctgacctataatccagcaatcccactcttgggtatatatgtcctagataaattctgaaaagatgtgtacaaagatttcattgtagtattttacttgtgatagcagggacttagaggcaacctaggtacccattccaagggaatagataaagtgtggtggagcatctatgggagggatatgcagtggagaagcgacagcctaaacacatatagcagcatggttagattttcacaacagtgttgagtaaaaaacaataggaactggatgagatttataacatattatgacttatatgttaagttaaaaacatacctaccaaacttttcctatttgatttggatatttgaatatttaagtttgtatgttaaatatgtcagagatggtacccatgctaggcagggggttgaagggggaaaaagccctgtagcatctggagtcaattcagacatagagaataataatatgtctaaaattaaagacagagatttcaaatttgagatattttccctgtaaattttagaaggttagagtttcccaaatttagatttttttttttttttaaagaactgcctttaaaccaagtttcatgccctgcttgagtaggccatgactttgtctatggcagttagagctagactctaccttttttctgctcccaaattgctccgagttgcttgtggtgtgaaaccggtatacacaatcagttgccttactttctagaggatgaaccccttaaggacagggctgcaactcagtcatcctggtgtccccatcacccagcacagtgaccagcagtgatctgtacttatttgtcacctttaattgcatcacggtgtttgtagtctttttggtgtatgtgcgtgccctggcaagaggctcatctaaggcatttccccacaaaagggcaagcctctcccacagatacagtataatactaacttccaagaacataacatgtcatatggtcacaggtataaaaacataaaatggattttcccgagtgatggccaaatttatccccacagggaggcagcatcttttctacttaagaagtacctttcggaagtgcttttcaagttaatccaatcgcaaaaacattgaatcctactaagtgccaggggacagaagtctagggggcatttccaccaagatggccagaaggctctagatcaagtggtaaacagagcgtggtatgtggagtacaatcctttcggcaataatagtcataataggaaataataaagacctacatttatagaatgctttagacctttcaaaagtactttcgtgtcaattatctcagtatggtttggtgaccaaatctcaggcagcacctgtgatcaggtagatgttttctttggaaaatgatctccagcattgggctacatattttttaggttgcatgagtgtgcgggggaaagaggcaattgtcgtatgcttccatagaaggagatgaaggagcgaagaatggaaactttcccatccctgggagtaaaaccttacatcagtgatacccaatcctgcttattgatgccccaggggtgtcttgaaattcttcaaaggaaattaattgtaattcacttcaatttttaaaatccacagatatgctgcatagcacaatgcttctgggcagggtggcccaggggaggtggactgaaagttgtgtgtgtcaaagaagctgtcaatccaccaaagaacaatagcaagctgaaactcccccaaatttgggggagtgattggtctgtgtttgaacctgcagggtaggcagaggcagaaagggttgatgttgattactgaaaaagttgaaatagctttgtgggtgaccagaatgacatcatgctctcaacagaggatgccctgcctggggccactgctattaagatgcccagcttggctggacaccatggctcactcctgtaaactcagcacttcgggaggctgcggtggatccaggctggggtaggccttggattgcctgagcccaggagttcgacaccagcctgggcaaccttgtgagagccctgtctccacaaaaaatttaaaaaaattagctgggtgtggtggctcatgcctatgatcctactcaggaagctgaggtggaaggatcgcttgagcctgggaggtcgaggctgcagtgagccatggtcatgccattgcactccagcctgggtgagagagcgagacgaccttgtttcaaaaaaaaaaaaaaaaaaaaaaaaaaaaaaaaaaaagcgcccagctcttcccaaagtctggaaaagcaggcttcctggcccctaggggctatgtcaaatctgtgttccacagtggatggcaaggcttcattttatccttatcatctttaatcggctaagttaacaattcattgctcttttttgagacaaagtcccactctgtcacccaggctggagtgcagtggcgcaatctcggctcactgcaacctccagttcccgggttcaagcaattcttctgcctcagcagaagtccagagtacctgggactacaagcgcctgccaccacacccagctaatttttgtattgttagtagagacggggtttccccatgttggtcaggatggtcttgatttcctgacctcatgatctgcctccctcagcctcccaaagtgctgggattacaggcgtgagccaccgcacctggcccaattcactgcttttaacatttgttgatgccaagaaagtgctactggaaggctgctataggtttaagaacacaatgattggtcattctttttctttcctacccagattggaaattccaagtttgctctgtcatcacatctggttaatgcagacactcgaatcactgtgtgttctagtactcagaacttaaaagtcatcatatcggatatgggagactcactgacaactgggcctcaaaggaatttatcaagcgccgcctctgcttttctcttcctgctttgctgggtttgcatgggagctgggatttgcgggcagctgtaagtgtgtttgggctggaggcaaactcttgtgtctttttagcctgattctacatagcatagtaggaaaggggccagagaaagtggctggcagtaagaaagcctctgttttgagaatgtgaagcagcctgggagagagtgagggaagaaaggaggggagccgagagttagaaaagccttaattcatttcatctgacagctcagagccagaagttgccaggtctactcatttgcaggttgtgttgtcaacacaatcacagtattttatagcccacacggaccttggactctggcatgccatgtaataggctgcaaaaagtagcagctctgcttcccatctcacttggggcatggggagaggaggattgggtttagggaggaagggtacaggtgtgaagggcacaggtatgaggtgcataggtatgagagactcaagtgtggggggcacaggtatgggggcataagtatgagggacacaggtgtgaagggcacaggtatgagggacacaggtatgagggtcagggcatgagggagacaggtgtgaggggccaggtgtgatgggcacaggtatgagggacaggtgtgagggacacaggtgtgaagggcacaggtgtaaggggcacaggtgtgggggaacatgtgtgaagggtacaggtataaggggcacaggtatgaagggaatggatgtgggggacacaggtgtgaagggcacagatgtgaaggacacagagcttcatctttgctcctcattttgttcttgcgccttctctttccagctgttacaaagtgccttccagtgggccacctccccacttcctctgttgggggcaggccagcacagcctattgcccagatggcagggtctcaaaacagcctcccagtgacctggttctataatatcctagaaggagttggaggacatgaccatgtcctggttctttgtgttcagataaactcaaaggccctcaatttcaagcccttccacatcctgtctctttcttccttccattccccagaagacagtgattggtgggtcaatgggctccataggtgatgttccaccccatgggagagaaaggatcttagtgcagctgtgcccactgtcccatacgtgggctgctccctctgcaggaagtctatctctgcagaccagccttgctgtcaggagcgccctggtcacccggcctctctggcttattgtgcaggaggggcagaattctaaaccaaggagaagaaaagcccaaatggagataagctggcccagtgcagaggggcagcataacttagtaggaagcactaggctagagtttgagtcctggctctggctttgcaaagtgtgtaagtttacacacaccactttacttttttatactcaatttctttctctgcaaactatgggaaaaaatctccactttctctactttacagaactaatataaaaatgtgtgaaagcactatgcagaatatgaaataccagatgaaagtaaggtggtggacagaactgtacagcctcaggcttctcaaccaaagatccaggtccattctgctgtctgcctccagtagatgtttgacacgaactccatagtctcaatttcaacctcatacttcatggtttctttgtctcttccctgggttttccccatggcgataagagatcagaaaatgtgctctctctttgtgtctgagatgttggagatgactaagaaaatatcttaaatgtattttgaggcctggtattctaaaacaaagcctgctgctgaggaaaactacaaagggtggtacagatttaaaaggaggcagatagcctgctgcaggcaggaccacagtcttatcacctcactacacagctataaagacacacaggttctgaggtggcatgtcctgcagcaactgtgtaaggcagggcttcttatccctgttttacagataaggtaatactgaggctttgtgagcagacagaggtctctccaatggtgaggccaggatttgatcccaggtccgtcaaactccaggatccattctcttccccctgcagcacaataaatttgattatgcatagaatgtatatgtgacagctctcatcctgtatctgcctcacagcaggacttagtgctttgatgaatcctcaaaataatttagtttcatagtacactgatgggaaatggagcttttactgaagattttctggggccagatcaagaagacattttgcattaaacatcatctaaacaaacttcctttaattccttgaattcattcttaacatctctgttcttcctaatgcttgtttctcagctctacttccaggattggttcatctattttttctcactcttttgctttgatcccttggtatctcctccattgttccaagtaattcatttccctcccgcagcataggcagggtggccgagaaaaagccctgcagttagttgagctgccttcctttgatagcaatccagtgagcatctgggttattctggcatgtccccaggtggggctgaccaaagcattcactcaacagagtaggtgtcctccaaggctaaggtggactgtgctattaaaaaaaaaaaaagatttttctttatattgtgtgatgtgggagagatggagaaggagaggtaaaagagagggtgtaaggtactggaactgctatggggggaaagggaggagggaattgacaggggacattaaaatttgaattacaggacttggtgattatctggagaagtagagaaaggaaagagaagggaggactcccaggtacttgactacagcagcagggtagagtaagatggagaattctggaagaaaaatggatttgagatgggtgagaagaagaatagtttggggaagataatttagtttctgaatgtagggcttccttgctatctacttgggaccctgcccctcctgtctgaccccagcagatgcactttttgctttagttttaggtcatctgctgattcatctgctgattcaggccagcaccagctggggagatgggagcagccagcaagctcaggagctcagaatgtgattccccagctcaccgccatgatgagtgctccgtagacaacttactctgcttggagtcccctggggttgctcccacctctggggtctcctcttccatttttcccagctgtggttcctctgtcttctctctctgtaaattttttgacttctgatctttcagaaatttctcacatctctggctcactgatggcattcatgttttccagtactagttttagatatgttcctaaacaaaacacaacaaaatggaggaaaagaaagagagatacgtactgagcctactttcttgatcaacacttctatacttatttgttttcatgtctcattccccttcatgactttgaatttcttaagggcaggaatccctttctttctgagcactaaccaattctccttttccatgcactagggaacttagtatttaggaaattctgtggctacttcttttgtaattgaaaacaaagattaaaatacaatacataatcttccaattcaagatttgttttttcatatatttccaagtcaacactattcctgagtgcctcttctgtgtttagcatgaatttaagcaaatatgtggaaaagtggaaaacatgaacacaccagatgaccctgctattccccatgcttctgggtttcagggctggagaggatgaaggataggaagtgaggatgaaggatggaagtgattctctggcctagaggaagtgccttgtgtagctggctcattggtaggtgagcttctgtcagtcctccccaacttcatgtctttgctgcatacttgtcctgtaattggtattacaccaggagtatgaggtacaacaggtgatgtagcacacaagggccttgccctcaatgaactgggtggatcagcctgacacagaggcagcagttggggagcattctaagttaagagttaaaaattgtagctcttgacagatctggtctcaagctcacctgacttgctaaattagtgattcatgcagtaagatcattcagattccaaaaagggaggcatcagtatggggagagcatcttttcacctttgcacatggctccagaatttccactggttcaaaagaatccccagcaaccccagtctcaggagataattgctcttaacagcgcaccacactgggcaccccagcacttatggacagcagaggaatgtaagggtgaatgcatgtttttttttctgcaaatgactgtcactcattcatcttggagcccacctgacaacttgctttccaggtaaaatagcatcatttttctaggctggcttcttctatgctcactagcagggctgacctcagatgtctggggcagtcttaggtaccttaccagactgtggtgttctttggggggacttccaggactgggagaggatgtggcaggggccattgttctggagtctcccaatatctgtgaggtcatcacaggggtgccatcctgcccttgcagcacagcttagattttgccttggtctgtaataaaggatgaagtgaatctctgccaaaggtcccaggcttgcttggtgccaagggtttcattctgagcacgtcagcatacagtcggcctaatggataaagctattatagattatctaattaatacagcagactgctgtttcattacaggggctatggactctgtcagtgcacaatgcgtagaggtactgccatcagtttcttgttcctggtgttggggtggctaatgtactatatgaagattcagaggcatttaaaaagatgatcaagtgccatgctgaattcatgtttacagcttcttggcttgggctcttgaaatctagaagtctttgggactgaaagcgaagaatttgtcttggttcaaatgctgtctgctcaatcccattattgccttccagcacgtgcccttggacactctcgtatcttgttgtctggttgtagagcagattttcacatgctgggagacatcatgaaatgtgccatttgtttcactgagaaagctcttctggtggctggtggggctgtggcacctactagatcactgtgttatttccagatcctgtgtttggtgtaaatggtacctggtttgtttcctatctttaaattacagtattcttaggagtgctgttcttttgaactgcacctgttggactcttcttaattcccgaagaatctgggccattgttttttaagcttgtaatattatccttcactgtagggtgatttggtaaggttgcacttccaaggttcttacattcttcccaaatgtacctcattgcacaagctgctaccaggagaaaagggtgcctggattagtctcagggttcaaatatccagaatatcaaggtttctcttaggaatagttaactgagtaaaagaaaacctgcttgttattctattttgggattttccccccctataaaaatagaactgtatttaaaagttaaatctagactgggcatggtggctcatgccttcattcccagagctttgggaggccaaggtgggaggatcatttgaagctaggaatttgagaccagctgggcaacatagcaagacctcatctctaaaaaaaaaaaagaaaaaaaaaattagccaggcatggtggtgtgcctgtagtcccagttatccaggagcctgaggtgggaggatggcttgagcccaggagttcaaggctgcagtgagatatgattgcacctctgtactccaacttgggcaacagagtgagaccatctcttaaaaagaaaaaaaaaaaaagcagttaaatctacgtatagatagtaaagtgttttagtttttctgttactgcctttacaaatgaccacaaatttagtagtttaaaaaaactccaaatttattatcttacaattctgtaaagcagagacctggtatgggcctccccaggctaaaattaaggtgtgggcagactgtgttcctttctggaggctctcagggagaacgtatttcctgctccttctggctgttggcagaagtcaagtcttgtggctgtagggtcgcagtttccttcccttgctggctgtaacctaagggctctttcatgcttctggaagctgctgcattccttggcttgtggcctcttctctccatcttcaaagccagtaatagcgggtggggtctttctcatgctctgtcttttgaactcactcttttctcttcatctctgcttttaagagctggtgtgattagataagagattatgtaattagtcagaccatgataatccatgataaatctcttcattttaaggtcagctgattagcgacctcaatgccatctgcagtcttagttcccgtaatttacaggttctggggattatgatgtagacatctttgagggggacattattctgtgtaccacatatgatttcttcattaaacacaatacatgtaatttaaattctagaggttacaatggggaggaggtaaattagctttttttgagcacctactgtatgccaaacctcatgctagatctgcacatgcatcccctcattctaacatctcaacaaccagatgagatagatactatccttgtttgatgatgagttaactgaggtttagagaaattaactaactttcctgaagtccaaaagctagtaaacgtaggagtcaggactcaagctcaggtggctaagattccaaatctgaatgtttctctttccaccacatcatattttttctcctgggatctcaactaaaagcctcagaagtaatcacttatttaaatgtatgtgtttcctccaggttcgttatagtctgtttgaagtctgagtttgacgtagatagattactcatttcccctactccagcctctgataagcagcagaccaattgtatattaccacaacctgggaaaagagagataactgataaagtgaagagactttgtctcaaggcctttggtggggctgagctctaagtcaactaagtggcttaaagtggaaccaggcatcttatccctgcagggcctcccctgggtgtgacaggtggagggcataccagtcggaaagctggtccaagcctcctctgtcctgctcatctcagctgcctgggactctgcagagaggctgcctgggactctgcagagaggctgcctttggtcaattcaagctgccccagccagcacggttgactggcacagaacggcctggagtggctgtgccaactcagtcataatgggaggagctgtgcagagaaagaccttccaggaattgagggtgcaaggagataggatggggcagatatgagcggcaagtttggtggggccattggcagggccacatctggaggcctcccattctgtgaaacaccccagcagtgtgttaattgatttattttgagtgcagtttgtttggatgtgggtagactattgatgctgtggcactttggaagctcacgtttccaagccagagatacttcatttgtgtctgaatgagaaaaatctcaagatacatgccgttccatccctgagatgcctgccacagtaccaactcatggaggctgcagttacttcagtctcatatacacatatatgtgtgctcacatacacacttttaaataatgtgatcggcttatgtcctgcttcagtattcttgctcttttcttccaatttgggtactgctctgacaggctggcagcacaccacaattctgtctttgcacattgattgacctgactctgacatatcaggattgcaaattactaacttgcttttaggccctggctcctgaggaatttataatgtctattgggatctcttctcccccttagcttctgcattgagagtcagaagtgtgcatgaagtggtgttggcttctttctgtttgtatccaggagggtgggaggccccaggagagcagacatctggggcttctttctgttgcactgccaatgcctatccacagatgaccttatgtgaaggtgctaggctgtgaattcctttgttttatttcaggaaacattgattaaacatctattttggatattcaaagacaaaaaatgaccaacttatttctcaattaaaatggcaaatgcaatatagtgttatcattgctatggggagtggttgggaaatataaggtattataggggcacaggggcacataggagggtgcctatattagtctgttttcacactgctataaagacatactgagaatgggtaatttatgaagaaaagaggtttaattgactcacagttctgcaggctatacaggaagcatggctggggaggtctcaggaaacttacaatcatggtggaaagtgaaggagaagccagcatgtcttatgtggctgcaacaggaggaagagagagagcaaagggggaagggctacacactttcaaacaaccagatttcatgagaattcactatcacaagaatagcaagggggaagtctgcccccatggtccaaccttctcccaccaggtgccctcccccaacattggggattacaattcaatatgagatttgggtggggacacagagccaaaccatatcagtgagtgcccaaccccatcttggtagtggatggtcaggaaaagcttcctttaagaactgacatacaagctaaacctaaaaacaaagtggagattttcaggtgaagggggattgtgtgtgtgtgtgtgtgtgtatgtgtgtgtgtgtgtttgtgtgtagaaggggttcaagaagaaggaaagacaagttctaggcagaatagatggcatgggaaaacacccagaggccagagataatttggcaattgagagaattagaaaccgagattatgggtggtttttagagcgcagtaatatcatggatggaggtatggggagagattagattagcaggaactaaaaaacgagataataatgtataggccaggtgcagaaatttgtgctttaaccttagggaaatgcagagctactgaacaattgtagaatagtttcatgatcaaatttggctttaaaggagatgattttagctgtgatacagagaacggcttggaggaggcaggaccagcatcagggagacccactgcagtggtcttaggtgataagagcagtagcctgacctaaggactagaatggagaaagcaggtgaatctgaaagatatttaggaattgcaaagagtaggactttgtgattgaagaataggattgagggagaggaggtggcaataagaatacccctatttctggcttaggcaactggatggtgatagtggagccattgatggctacagagacagagaaggcagcacaagtgtggaggcatggggtggaaagatgagagctgtatgggcatgtggaggtatagaaatacttctgtgctgttgacgaatagtcagcccttagcaggcactcatatattttcttccactgcctcgctcaccctaactaacccagtacctagggcattctcaagatctagaaatggaacagttactgtgtgacatagcaggaggtctcctgttctgactggttagtgcccttgccataccagatcaatatttttaacatcccttctgtggagacagttcctgtggtagggttcctgtggcagttggttgtaaaaagacaagagctgaggagaaagaggttatagccaaccaggcacggtggctcacacctgtaatcacagcattttgagaggctgaggtgggtggatcacctaaggtcaggagttcgagaccagcctggccaacatggtgaaaccccatctctactaaaaatacaaaattagccgggcatggtggcgcatgcctgtagtcccagctacttggctgaggcaggagaattcacttgaatctgggaggcagaggttgcagtgagctgagatcatgccactgcactccagtctgggcaacaagagcgaaactcagtctcaaaaaacaaagaaaaacaaaaaaaataaagtcatagctagcaatgttttatttgagagtcaccacctaaagggtaaagcctttgagtgcatgaaagtcttcaggaagagtgtagcaagaaggaagacagggcccagggctaaggaatttggactttaccctacgagaagtggggagccaataatgtattttaagcaggggcatgaggcaactggtgaggcctgcaggactaaagggagtgccagagatgtctgacaaggttgctgccctcaatgaactaattggggtaggcgagataaatgtctcttggaaagtaatggtcatgccaggtgtgatgattaagtagcaggtgtgtagcacagagagtaagggggctaattgtttcccacaaagtaacttggagcccctatggttagggccggatgagggcttagtcaatcaatttgcctttgtggtaatcctgaatagaagaggctgctccttgggtgagaagacaaatagacttttgagttccctttaaaggctagacacttggataactaggaagggttcttagtaaaagcaaatgccttttatgagactgtgcagtttacaaagccctttgatgtctgctacctcatttcattcttttaacaagtaagttagaggacattgcagagataaggaagtgaggcccagagacgttagaagttaattaataagttatggagccagtcttcatgtctgggtctttagatccaaagtttgattctttcacacttctccagtggtttgcaaactgtgttccttggagcccttcagggatgccttgggcttgcaggtgatggggaggggatgggaagcattcagggagcagggcttctgctcccagagccctacctcagccagggctctcaggaattttccagttttctatgtcagcctgttttggaaggtttcccccaaggaagcatttcccaatgtggaaaaacctactctatgctgtcttcaaggctatctctaggtaggcctgtccctaaaccctcctccgaagttggtgtgaattcctgtgcttaaccacatacaagatctagcaaaacacttcttcttttctaaccctaactcttcagctccagctccagcctattccctctggatcttgttctaggttgtctggtggttcttctcagtacaatctgtttcgtttctgccccaacaccctaccacctttttctagattcctggcactccagacactggaagaacgagtataaacatttaccagcttggatcctttcccagacatgcattgttgctgaccctgtgaccatcagctggacagttttagtgtcttcaaatcttgatggacttgtatttggacactttgtggcagtgtttttctgaaaccagtgcatctcaagtagttggatctaataattcctttgttctcagaaattgtacgttcattaaaacaatcctttgtccattaagttactttttttaaaggctacagtttgcctggatgtatccagtaggcatgagttagagattaaagacaaagggcccaggggcaaaggaaataattttgtttcctaatcatacagtgacattacaagttagcatttctgtagtttcccttgctgagaactgcctagaatttagtgataatttcctgactcacaaattgtgaaacctaggcctaagcctttctcctcttcttaaatatttattgagcacctacagtataggtgcaaagcttagctctaggctctgtaaaggatacagattttaacaaacagtttctgccttcaagggagttaatggtcccagcatgtgcctaagtaatacaaggaggaggcagggaggggtggatggagtaagtgctgagggtggcctgaaaatggaagtaatcagtttatttcagggttccaaatgagaacattagtattatgctaagtaacttctcttttatatcctgctccagaagtgtaggggttggtggcagaatcccgcagtggacagaggcccagaagccaactggacagaaggtctagcaaggagagctgaccctgataaatctagtcccagctgctggtgtggttgatgatagagagctgtgggctccagaggaattctggtgctgagacaaactcacgtatttcagttgtatgctttgcaaaatctgtttgattgccagtagctcttgagcccttagcccctgataggctggtcacccaccagatccacagcagggagaacacaggctctgcagacagagactgggtataggttactgctctctttctcactttactgtgttggttgcttaacttctcttgcctcagggttctcacagtgcagaggggaaatgatacctaccttgatgggtggttgaaagggtgggagagcgtgcagggaaagagcttggcatacagtagacactcattagatagtacctcattacttttgttatgaatccaagggcttcatggtgggatcaaggaccacagctgtggtggcctagcacagatgttgcattttactcttgtgagtggtcaggaaagccatgctgtatggtggagtgagggtctagagatcaggcccccatccccaccccgctccccagagcctccaggggaccttggacaagactcttaaccttctctgtacattattcctattcaaacactgataaaatggaagtgaaaaatcacaaccttctgaattgaaagggacctttcaatataatctacaataggtgtatttagtagaagagacagttgaggcttagacaaggtgaaatgaagctccaaaggcaaatcagggggtggccctgtcttgactcccaatataatgctccccttcacatagttgctacccaagtaggtggtggcttgagagtttgggagcattcatgaactattgcatctgaggtgcttttggctggaccacttatatcatagacaaatccatttttattagcatcattcaaggttcatagcataaaggcagcaagaaatggtagtgaaaatatgctgtcttccccctaaaccagttttaatttcttaactccctcctgccccttagttcctctaagtattttcctcctctgacctgatattcattcacttggtatttattccacatgtactaggctttgcgtactacagggacttcatagccaagacatgcaaagttgaaaagttggataaacaatacaggaaaaacaaaagtgaacaaaaatgcaaagcactatatgattaaatgttaaatgagaaatctatgcctgtggttcccaaatgctaatttatggatttgtacttgttgatgataacattttcatcagttttctgtgaaatgagaaaaatagggcaaggtgtgattatttcataaggctacatttatttaataggattttctgagattatatccttccaacattttagtgctaaaatgccctttcttttatgagatgttggagcataaatagtggtggttgaaagcccatacttaaaaaaatagaaagttggccacattatattggtttcttttgaaatttggctcatccttgaaatctaaagctaagacaaccactggtgggcacaaaagtccagagtgaaggggaggagcaatttttgaggagtggagtgctcagggagagctccaaggacaaggacaaacactgataaggaattgaaggatgagaggattcaataatgtggagaggtttggggaggcttcctcttgagaggataacgtgagaagagccttgggagcaagtgtggagggtctgttcagggcaatagggagaaaagtttggatgccttgtctttttacctgctgtgctcgtaaaaaattcacccagttgttaccacaataaaaactgatctttggctcctttcaattaaccaggtcactgtcctgaactacttgccccagtcactgaatcaatgccccagttcaccttgtattccagaactagtctttcatctgctcaaggcaaggtcaaaaacaggcatacaagagcatctgatgctcagtaactcagctccagttctgacttcttttttttcatccttgaccataatttagactcattaatgggttagatggtctttgctcattctggcctcgtttctgggccctacaccctaggccatgcccttgaatgtgtccctagctctgtgaggaggacccatgagcagtagtgtgccagatgcgtcacagaggggacttagggaatggaagaaggctcaacaggatgcatttactgggtggagagggaggaactggtggcctatgcctgtgggactgaggttcggatggttaccattgactaaaatgggaagagagcctgtttggaggagaagaatttggtttcagggatgttgagcccaggaatgggaagggagaactggtaagaaattggagggaggtgaagggaggatgaggagaaggaccaggtccatttggagtcatggtcaaggtcttctggagagagactgcatcattgctgatggtaccagtgagtgaggaggaaactgaaaagagttcagcctcacaggaaggctggaaattagtgcaggagggatgggcaggtgagtaggaggctggggaggtcacagaggacaagatgagagagtccattaacctagagaacataccatttgtgtctgtagggggtactcctgtgttctggactaggaggagttgtgtttcactatgggtgaagagcctgagggtaaggagaggctgtgcctgttctgcgaccctccatgtgatctgaggtattcccttggcacatactcagacacccacctcctttgcttggtgtcttcaatctttccatacctcctcctcagggggaagaagtccttgcttcaagtaactgactggctgcaagtcatggagagggttggggccaagggagccatctttttttacgcctccctctggggctgctaagagcagtagatctgtttgagcttatttatgtgcctggagttgagagctcatattttgcttattcaaccagcttcccacgctgccaggaaggcactaagcagcagaaattcatgttcaccctctctgtctccctctctctctcactctgtctttggtattcttcagctccaatgggagctaatatttacctgcagtgttagctgtggggccgtgggatgtggcagctggaggtggagaagacttttttctcccttcctcctccacctgtctttccctagagatttgaaaagggaaaaattgtaattttaatctttaagactgcctgtttgagatttcagatgttgttgagaaaagtcaaggggtcttgtgctcacttttctactgaaagataagtgtcttagtctgtgagcctctataataaagtaccacaaagtaagtggcttgtaacaacagaaatttattttttatagttctggaggctgggaagtccaagatcaaggcactggtagatttggtgtctggcaagggccctctgcctgatggatacctttctttccactgtaaccttacaaggtgtaaggggcaaaggatctctttggggcctcttttaaaagggcactaatctcattcatgggggctccacccttatgacctaatcacttcccaaaggccccacctcctaataccatccccgtggggggttaggatttcaacatatgaatttgggtgaacataaacattcagtccatcaaaacaaggaggaagatgagattggtgggcttttaggacatgctgcagagaagggagaaaatgtcagccaaggaatactgtcatactgttccttacaagtggagtgactcccgcgttggtgacaagagggcatggatgacagagtctgagacattactatgactggtcttacttggtgctggtcagctcggacaacttctgcagggggagcctagcagatttcatgtgctaggcacaacaagcagggctggcagccatagcttctccctacctgcagggaatgtgcataggggcaagttccctctgagcccactgcctggtgctgactcagcccaagtgcttacctgctcaccagtcaggagttgaacatatagatgaagttgaacgaatgtctgaggccaggaataggaaaaatgtctcagctcaatgtggtttgcgcatgacaaaaagagtaactggtgatatttctaagaccttggtacattcccactatgggacaggatcgtccctctccaggatgctgggggaagggacaggtgggagatggggcagggatgaaaaggagaaccttgaggccgggagtgggtggggatgttggcctgcatggattccacacaaggtctaagtccatctgtgtgtgtaagccagcgcccatagcggctggaggctcctccactcacttctccagtgccttttcctgcctttatagcagttttccagaaagtctattcctgttcttcaaactgctcttttatgctgtgtgtcatgatttctcatgccccagtttgtcctgttgttgccatggtagctggctaggggtcgtctccagttgggtgggaatatcttgctggcaggccacggaggcagaagaagatatgggtgacttcaggctggtgcttcggggactcctggtgttacagaccaccacctggctccccattcctacccctctgcatttcccacagtttcctatgcccaccagaaggcaaaaacagaggaggaaataagtgtaatatttgcctttgttacggccatttcagaaaaagcctggcaaggcatagactgcccctttcaagattgagctatggcagaactaagatgggacccttgtctgggcaagaaccgcaagggaacacttgtcccatcaacacttagaaagagaaaagaaggcagcagacagcaaggcaggatttagctgtgaaaagccacttccaagaaacacgaagataaactgaatgcccttgacacctatgagctaagcatctggcagctgggactctccatgcctatgaatatagaaacttttgtatgggcccttgacttcacttttgtgaagtttcctgtgatttgggcacactgcattattgtttgcctttctatctttcactttggtttctatcacatttgatggctacttttcacatgatacattttaaatcatttatttacccatccatccatccatccatccatccatccatccatccatccacccatccatttattcaacaaatattcaagaaataaccattgattacatactatatattatgtactgttccaactatggggagatagcagtgaacaatattgacagtctctgctctcaaggagcttacattcatctgagatagatcaataacaaatagacaagaaaatacaggatagtaaagagtggaagattaacctggggtgatgtcacagactgtgactgggtggatggtccaggaaggctctgcaaaggtagcatgtgagctgagatctgaaagccaggaagcaaccactatgggaggatggggaagaacattcctagtacagggaacaacattcccagtacagggaacaactagcttaatgccctaaggcagaagcaagattggtatgtttgagaaacctcaaggagggcagttgagataggtgagccggtgagcacttgggctgagtcagcaccaggcagcaggctctgagggaacttgccctttacacatgttcaggtagggagaagctatggctcccagccttgcttgttgttgtgtctagcacatgaactctgtgaggattcctctgtagaagctgcccacgctggccagtgccaagtaaaccagtcatagtaatgcctcagactccatcatccatgccctcttgtgcctaacactggagctactccacctgtgactggagcgatggggaaggacgtggaagatacagtcagagggttagtgtgccagacaccttacctgcaccacgtcacagccttgtggcctcaactgtttctgggacttttggctgcttgttcaggttccagttgtcactgcagtgactgaccaactccatgcatgtaaaacccgacagcacttcacctcatgaaggtgtacctcccacctcttaccctggagcttccctattgacaccaactcacgagatgcacaggactctcctgggcaactggaaggtggagaggaaattaactccctgagtgatgaacatttgatcagtgagagattgagcagatgaattcttctctgtcttctgatggactgtcctgaggcacagttgtcttttaccaatggccagctaggtaatgcaccatcatattggctctccctccttgcctgccttacttcccttttccctcactcctgcttccttgcgtttgcataccttaataaaggcacctgaacccttgcctcaggctctgctttctgggggaaaccacacttagacggagaggcaggcaccagctgatatagggcctggtaggacatgataaggaatttacatttcattttgagaattaggggaggttattagagaatactgaactggagaatgatatggtctgttagacttttaaaaaagctgactctggttgcagtttggagaatagattgaaggaaggcaggatgagcagtgggcaggctactatcacagttcaggggagagatggatgatggcatgaaccagagtgggagcagtggtggtcatgagcctgtgtgtttgtgaagggcaaccataagacaaggctgtactgagaagcatactgggtagtgggccaggaacaggacccacacctttgcacagcagctgttatggttgaaattcaaatatgtggttcagcaagacaacaaattacaacctaccaaggaccttcatcacctgttgaacatagagagacttcagctggggagaactgaagacctttacagaaacctcaggacatttttattcaaacccatccatggagttccctcaggaggaaggagcttgggttcagctcctagttgaatcaagtaactctccgccttcatctgtttaattcatttacacttagagtagtatttcttttgcagaaagggatgcatggctaaaaatgtactactgcttccattaatgaaaattaatttagcttaataagatgagtctgaatcttggattctgccagccctgagtttgaattctagtttgacccgtttctaggtatgtggcctttaagtttctcatctgcaatatgggaattaacactaacttcctggagttgtgagagttaaatgatttgggtgtataaaatatctgatacatgctctttataccctctttactccactcatagtaaataaatcctgtgggaagctgaagtacggtggggattgaattgaggtgggtgcaaccttagccctcacctggtagacttccttctagagtttaacctggagatactggagcttttgccattaagggaggtaacagatcattacaaaacattcctctggagttattcaggagactagaactgagccctttcttttgagagggtcaaaacagtatcggtttatgaatgactatgatagtacccctgtgagatagtttaaaagaagtgttgggccgggcgcagtggctcacgcctgtaatcccagcactttgggaggccgaggcgggcggatcacgaggtcaggagatcgagaccatcctggctaacacggtgaaaccccctctctactaaaaatacaaaaaattagccgggcgtggtggcgggcgcctgtagacccagctactcgggaggctgaggcaggagaatggcatcaacttgggaggcggagcttgcagtgagccgagattgcaccactgcactccagcctgggcgacagagcaagactccatctcaaaaaaaaaaaaaaaaaaaaaagtgttgttcaatccattttatagatgatagtttctaatacttcaggcagttgtgccttccctctgcaatcaaactctggggcatttttccccttgatgctgtcttcttcacttgctcaaccaaaaataccagctcttgcagaataaatcatcaatttctgagggtggctgatgtgaacaactcatatgaatctcaggcccatcttagatttttttttttttgggaaattacaaaagtattttacatttgttatagaaaatatggaaaagcatatggaagaaaatgaaaattatccgtaatgccatcatgtacaactgatcgttaataatggataaatatccttctaggcttttttttccctacacacatacctgtatgtatattcacacacatacatatacccacatacagcttattatactaatggggattatagggtgcacatcttgcttttgtaaccagctttactgattaataatatattatgaacagtgtactgtgtcattaaatatagttttaccatgtgattttgaataattgcaagaattctcttatgtgattcttatgatttgataacaagttccttattgtttttcacttacaatacaaaaagattgtagtttttaatattcaaatgaacaatccaatgaccagttttataaatgcatcttcatgtgcaagtctaatgacctgataaggagaaattcctaggattagaattattggggcataggctgtgcacatatttatgactcttgagaagtattgccctacctccttcaggaaaggttgtgctaattccaacctcacccacagtgaatgagattgcactcatctttgccaactctgggtatttcagttagtaagaatgtctcttgaacttctcctaaacacagtttaattatgatatatttcgaacatttgtatagaaaacaagagacacccacgtacccactaccaagattaaatacataataatatttgccatatttgcttcatccctctcccattttcaaataaatacaatgttacagatgcattttgtatgctcattctttgttccttgctccggaagtcatcactcctctgagattgatatttcattaccatgtgcatttttgtaattttactacatgtgcatttatgaaaaagcatgtatatgaattttttgagttttaaagttttatttacgtgatacatagaatgtgtccttttgcagcaaaatgaacatttgtttttaagatttaccagtattattacatgcatactgagttcattatttcactttctgcatagaactccattgtataaataaatcacaggttcttaattcgcttcccttctgaggggaggctaggttgctataattttttgttattacagataaaatgatcatcttgtccatgtctcttgggtgcatgtgtgagattttctctgggaaagatacctaaaagtggaattgctgagtttaggaatacacatttccaacttttattaggtacagtagttcccccttatctgcaggggataagacccccagtggatgcctcaaactgtggatagtaccaaatcttataaatgctatatttttcctacacatacatacctatgataaagtttaatttataaattagacacaggaagagatgaataataactattaataaaatagaacaattatgtgatatactgtaatgaaagctattcacataacttatatgggctctctctccctctctaaaattatcttaatatttttggactctggttgactgagggtaatggaaagtgaaactgtggataaggtggggactactgtattatctaacacattgcttttcagagtgaatgtgtcatttccactctgcatatcatatgcagcactcccatttctatatatcttcaacatcacttgagatgttcagaattattaaagtgtgccaatctgatgggtgtgaaatggaatccaattattgcattaattgcactttccctgattactaatgaaattgagcactgaacatatgtttgttggccatttggatttcctcttgtgtgaactgtagattcctatcctctgcccatatttctatgaggtagtatgtgtttttcttatgatttctgagaatcttgtatatgttctagatagaattcgtgagttgtcagtatcttctcccccacatgacttgtctttttcactttgtttatggtgctttttgtcatacagagttattaattttagtgtggtaaaatgtatctgcatttttttgatgatttttgttcatcttctctcattaaaaaattccttccacatactgagataaaaaagaagtcatttatattttttaaataacattttttacagttttgcatatcacatttggctcttttaatctatctggaattaatttttgtgtatagtgtgaggtgggctctaattttatctattttttctctgctatgattagtcctttgactcaacaccatttagtgagtaggcaattcttatctgctgtttctgggcactttattttattccactggtctatttgtatatccctctcacccatgtctcactaatttagtttttataactttgtagttttggtatattaattctccccaaattgtcttggctattggctctttattcatcatatgatttttaggatcaccttgtcacatttcactaaaaagattagattttaattgaaatggaataaatggatagattaacctaagggagccttgccatatttaagctacttcgttttttgttttttttttagtccctgggcatgacttatttcttcttatgtttagagctttcttaaagtccctcaagagagttgaaaatttttctttacatctttaattgggtttgtttttaggtaccttatggttttgttgcttttgcatggtgtcttcttatcattactttttctgagtctttgttttaggtgtaccagaacttgtacttttgtacactgatttcatgtccaccatctttgtagaattctcttactactgtgagtggctttttttttttttttgtaggcaactcttatattttggatgcaggcagcatcacctgtgaataatgataactttgttttttcctttataatccatatgccttttctttctttttctttacttattacattaaccagtacttcaagtccaatactgaatagaaagagtttcagtgggtgtcctagactgatacttcactttacagctatgtcttgacttagtccgtgttccctgtgaacaccaccttacctctgaccatcctgcccactttacgtggcattgttgattagtaatttagttccttttttgtgtatgtattcataaattagacattatatatatataaataaaattgtcattatatccactaatatcttttgctcctcacaccattttcttgcagaccattcttttcttccatttaaatttcctccccaagaaatgtcttatagtacttatttcccctgaacttgtatagtaaactctctattttcctggaaaagtctttatttcgagtcataatttagctattttcaacacttgatgatattattctatcactttctggcctggcctctattattataattaataatctaattgctgcttcttgtaggtaatctgtctttcctctcaggatgcttttaagattttttccttcatatttttggatcttttgatatttcactagaatatgtgtgtataggttgaatttatttttatttatcctccttagaattcattgaatttcttgacttggaggatttatatctttcatcaatactagaaaatttatcctacagatcttcaaatattgtctttctgcagtctctatgatctctttatagaagtcccattagatatattttgggtctcttcattctgtcttccatgtctgttaactttaatcatattttctctatttttatctccctgggctgtatactgtggagtttcctcatatgtgttttcctgtttactgacactctccttagttatatataatctaatagttaacctatctattgcctttaatttcaatgattatatattttattacaagaaattttgtatttgccactttttcaaattatctttttttcatttcattgcattctattattttatttctttacatatcttttctattatttcaagtactggagctttaatcttcttgttctttgtattagctaacttatccttatgctgattatttccttgtgtgcttcaaaaattttgattacaagtcatgtttagtagtgcttgttttccccatggaaatgcagtgtactcaggattgtgagagtagcctaatagagtagttttgtttggttttcttacttgacccaggggtgttattttcttggcctaagtgttcctgaatcccgctgaacatgtaaattcagcccataaatccatgtcacacacaatcctgagttttgatttctcagggttttgctttttctcattcactcagagacagaagcttccttgttatctatttttgctgtagagttgattttcatgcagtttatttaactgaaggtacagttctttaagggttatagcttagcgcagaatcttagttccaacttctgtccacataaggtctaaagaccttatcacttctcttgagtggacattaaaacttacccattaggctgggcatggtggctcatgcctataatcccagcactttgggaggccaaggctggtggatcacttgaagccaggagtttgagaacagcctggccaacatggcaaaaccatatttctacttaaaaaaaaaaaaaaattaagccttgtgtgggtggcgtgtgcctgtggtcccagctactcaggaggctgagacatgagaatcgcttgagtttgggaggtggtggttgcagtgaactgagatggggccactgtactccagcttgggtgaaagagcgagactctgtcttaaacaaaacaaaacaaaaaataaaacaaagcaaagcaaagcaaaacaaaacaaaacacataaaaaacccaacccattaaatctttgttaccaggactagttactgcctatgggacagctgcaatttcaattcacacgcttcctcctttgtatttcaattcctcctagggatttccttttatatctttcaagttcagcaatatatcttttcaaatatatttgaaaatatatttctgtactttatcagtttttctagaaatgtgtagcaagagattttcttattctgccatctttctagtactgaatccttgaatgacttttacaaagagaataaaataggaaagcataaaatagtccctgggaaatacacacagtcctctaagacttgaaactagatgttcctaatggagaggttagtaagagtgccggacacagcacaggggaagatttgaggaaggaagtgggtgagaaacagcagtgcattaatgggcaattactttctgccccctcagatggtacgtgagtgcttagctaatggcagttcacttagaaaagtgatcattggtaagtccttaccagcagctcccaaaaatatcttgcctgaagtgatcgagcctttttaggaaacgaaagatcagattcagaaagcaaggagatggttctcaaattctagtgaagacaaattctagaagaaaagctttcaaagggtgttgttgaccagagaagctgaaggattcaagctttcttgtagctttataaataagaagggaaagaaaacagaatgaaaagcaggggatgagggtacacagggttgagttgaaagcatgagtgtaggagttttcactgcagacatagctgatttgagggggaaacattgttttgcagggcttgtgaccaaatttcttaggatccaaagtgtcaggagaaatcctatttatttgaaatctagttgataagccttaagctgattatgtcaggttgaggtcactttttcttttcagcttgggttgtcccttcagactctgctgtcccttcagtttcttttatcttaaggcatggagccctgtgcaggcctatgagaccatcagaaaaatagaggtgcagctctgagttcactccaactctcaaaggctgtgacttactagatatgagggagaaaatgaaagtgtacatagtgaggcaaatgcattccactggggttcctgcattcctggtcatgatgttgatgagtcctatgagctagagcaatctatttaattattctacaccaggagtctcaactgggaggtgatttgggccccaagggtcatttagcaatgtttggaaacatttttgattgtcacagctgagtgggggaagtatatctggtgtctagtggctacaggccagggatgctgctgaatatcctacagtgcaagggcatcccctatgacaaagaattatgtgactcagaaatgccaataatgctgagcttaagacacccttctctacatgtcttttcttatctgcaacatggaggggttagaagaagaggttgatgtgtgtggctagattaggttattacccatctgtctaacagagagcacttcaacccacatcacatctctagatacatggaggaaatgaaattagttgaaaatgttccccaattttctaccaaagaacaaaatattgtactcgagatgtgagctttgcaggttcacggtgaccactgtgtctgcctccacgcattgggtcattggtcttgtcatgttaggtttgcgagttgcacttgcacctgtgaagggaaggttgaggacaggcttccttgagctgaactgattgtctccagaatggttttatcagctgtagcttctcccacagcaccttcccaacatggtgcagatcctaaggagtccatgtcctgcttgtgtccatttggctttgtttatagtttccattcatttatttatgcatttattcattcatttaataaacatgtattcagagtccactagacataaggcagtgcattagttactatggagaatgcaaagatgaatgagccaagccccttgtagtatagtggggagccaagatgtgtacaccacagtatctgaggcagggtgacataaagtgccagcagtactcagaggagagagagatcacttttgtcatatgaccacaaattgcttcataagggaggtagcatatgggctgggcttttaagtctaaataattttttggcaggtggctatggaagaaggggtaaggaagggagaaagaaaatgagaaatgatatggaggaggtcaattacaaggtgttctcagggaagggttaacagtcctgcttcattggagcagtagtaggagatattgctaggagcataatggcaggtaataaggacttagactggatgacatttaagttttctttcaaccctaagatgataagatcttatgattggatagttatatttgataggcactagaaaactcattcattcattcaacaacaacaaaaaatttattaaaattttttttttaaccagatactgttctaggcattggggatacaacattgtacaagcgcttcaattttattgcactgaaaggtgagatagggtcagagttgagctgtgcaatgaatttttgtggtagaacctggaagaggaagatggatgaggagactctgcccatctcctgaatggaaggtaatactgactcgaggggtggtggtgcaaatggcaaggacaggaagactgtgactgtggcatagagagaaaaatgacagggcttggggaatgcttgttgtgggagttggagtcaaggatgcagccaaagttttgtgcccgagttagggggagactgcaatgctgcaaacagcattagagacctaggagggagctggtttgtagagaaagaggatgagtttgcttttaaacaaactgattcatggtgctgtcaggtcatccaggtggaggtgcccatttgagccatggtgaatatagtaccagacaacaacaaaaacaaaaaccaacaaaaaacagagccgaagataaaggtttggaagtcttctggatattagctttatttgaagccatccatatggatgagatcactgagagagtgcatacatagtgaagaaggcagacaccgggatctgaggaatgttcacatttaggaggcaggagaaggaaaggtgaagaagatgaaggagcagttagggaggtagaaggaggagtttggaaatgctcctgagggaggcaggaagaggaaagccaattcatgctgagtcccaatatataagaatgtgtgcacaccctaatagcctccagggaaacagactttggggtgaaaaaattccctggaacatatttagctgtaaaagtgttgagccaccttatcatgttatcacttcttagtgcttcagccagagggtgaggagggagggggagtggaggaggctttccagtgagtcatccctcctgcatgttaggagttttggttaaaagatttacagagagagagagtgagagagagagagtgagagagagagagcgtgagagaaagaaagagagcaagaaagcgagagagagagcacgagagcacacaagtgagcgtgagcgagctgcttgatttattttaattttttttagagatggagtctctaaaatatttttttttttatagataggatctctgtcacccaggttggagtgtagtgctgtgatcacagctcactgcagccttgaactcctgggttcaagcattcctcccatctcagcctcttgagtagctgggattataggcatgtgccaaaacacttggctaatttatttttatttttatttcttgtagaggcagattctctatgttctctatgttctctattctctctatgttgcccaggctgatctcaaactcctggctttgggtgatcctcccatctcggcttcccaaagtgctgggattacaggcgtgaactgccacatctggccttgatttattttctaataggttcctagggcactgtggcaacaatgccttttcccctgagaggtatataaccaaggagaggacatttggggaccttctatgattgatttttgtctgtgccatcttgttccccatagccttgatggccaagtggctatgtggggatctgtagttcacacaaagcctacagttcccaggtaaagggactttttatcttttcacctttggccatggcttggaggaagctttgggcctactgcttggctcttatcaagtcctgagtgaccccctgctcttctacgctaggcccttgaaactctcctcaactagtcttaagttccaggctacaatttctccttcagcttgtctcttgcaataaggttgtcttggtctgtttttgctcctataacaaaatactctagaacgggtaatttataaacagcataaacttatttctcacagttacggagcctgggaagtcaaagatcaaagtgctggcaggttaaatgtctgtcgaggacacggtctctgctttcttgaatgctgcttcctccagagtagctgatggcagtatcctcacatggcagacagctgatggacaaaaagggcctagctacttctctccagcccttttataaaacactaatcccatccataagattagccctgatggcttaatcatgtcctaaagactttacctcttaatacttctgcattggggattaagttttaacatgaaatttgaaggtgatgcaaacattcaaaccatagcaaagggcagtagtaagatgtagtctctggcatttggcaggcccaggctccaagtgtagttctgtgtgatcttagtgtaggaacttagtttctctgatctttattcgccttatttgggaaatggttgaagctaaccatacctatgttgtaggattcttgtgcagatcaacgaggcaacacatatatagtgcttcagccttccacagatgttggttactgttgctgctttgaagagtttctttgattttttttttaacttaatactcttttggttgagttgctttcagaatttctttcccttttctcccaatgtttttcaattaagaaaaaaatgtaattaatttgaagaaaattataacctaacacctcttagccaacttctgtgcggctcttggggaaataaagggccgtgaatgctttgattatagtgatataattcccttttggaaataagtttgtttttttacatcatctataatgcctggtgtctgtccctgcaaatataacaataataccacccacagtggtgtgacactctgtgtttacaaagaattttcatacatatcaacaatctcagtatcattctgtaaactgggtctttcaccctcagtgaaagtaatcccttttctgatatcaccacctcataaaggtatctgcaccctcatgttcattgcagcattatttacaataactaggatatggaaaaaacaaaatgttcatcgatggatgaatggataaagaaaatgtggtgtatgtagacacacacacacaatggatttttattctgctgtaaaaaagaagtagatcctgccatttgccccaacatggatggacctggaggacattatgctaagtgaaatacacacagcatgatctcacatatgtagaatgaaaaagggaatgaaacagtggttagcaccagtgggtggggggtggggactggaggaggaagtagggagacgtaggtcaaaggatacaaagtaggtatgtaggatgaatgagtctagagatctaatgtggggcatgtggaataaaattaataaaattgtattgtattagagacttgtgttaaataagtagatatcagctgctcttgttacaaaaaaagtaactatgtgagataatggatgttaatcttcttcactgtagtaaccatcttactatctatatgtatccgataacatcctgttgtaaatctcaaatgtacacaataaaatttattttttaaaaaaggaagttgtcttttgacatcacctataatgcctggtatctgtacctgtaaatataatagtaataccacctacagtggcatgacaccgagtttacaaagcattttaatacacatctctaccatctcaacatcattctgtgagctgggtctttcagccccagtgagctggtgactgtcttcaggttttagatgcacgcgtgcgtgtgtgtgcgcgcgcacttgaggtattgcttcttttaacacaaaaagctgaagtttcaaagcaggtggggtgtgggttaaacaccgttctaaatggcaggcctgctgttcatggggagggagagtggcctgaaagtttaaaaataacctgaacattatagactcctgtgaattctacagcccagagcactgtgagtctgtgggtgttttacctgctggagtgcaggcaggaaaactagttgagatgcaggaggatttaaattcgctgagtcctttagtggcatgggctggcagcagaagtatttgtgaaaaaaaattaaagccagaactaatgatcaggatcgatgttcctgaatggtaggaacagtgctaccctttgatttgctgaacaccgcatagtatttgtatcgccggtgcagcagacccttgttttctatgactgaacaactatccttcccccttgctccctgaactcccttactgacctctccagagtttggctgataccttttgcagatagctaactgaggctggcctaccagggagctcagggttgggacattttggatagacttagccattcattgaaaaacaagtaaatggtgtaaaaccatgctaattatgcataaattatgggcaatagcataccctttgaattttgagagttttgaagggttgaaataatttttgaattagcactcagttcttgatctgactcctgttgctctgggatattgcaatgcaaaatgacagcagcagtaggaggagcaggttgggctacgaatgtatcatcacatttggtttatcagtagccccatgcgattcagagggcaggtactacttttgccatttttgcatgtaaggatataaacccaaccaggactgaggtgcaagcctcctggtgttgtttccaccctgataactcatttattctgaggcccttcggcaccatctgtagagtctggatatattcttgcctcttggaactgtagaatcatcatgaaatctctattctctagctcaaatttctattaatgatatcagcgagatgaattaaagtggctaagataatgggttttgaagtcagggtgacctaggattgatcttttgctatgtcacccaccacctatgtgaccatcagggaagttacttagttcctttcagtcttgcttctcttcctgtaaaatggggtttataatagcacttgccacatgggcttattttgagaaataaggaaagtgaatctggttagcatggagccttgcacattgtaagtatttaatacctaggacaaataatattataaacagcatcacctatacttttctttgtaattattctttatttgtttgatccatgtccatttttcttttttttacagctccagaatttgcaatatgaaaatagagattatttaaacaaaggaaagtagcataactggaaactttgaattattctattaatacttgactacatatggaagaatattattgaaaaatatgatccagtgatggggtggttttgtgaaaaaatacaagcctttaaaggaaaaagctaaatcttgagtgcatgtatatgtgtgtgtccaaggagttggcttgtcagtggtgttaggaggatttcagaaattctctcttgattgagaattacatttccacctttccaatttgtaaactgcacattaggaatattcagaaacctgcaaaagagcctgtaattcttcacatttgaatgtactgtattaagcctgtctgaaaacttcccgtagcatgggaagataacctgcatgtttgtacacttggctggcagaacgtgagatcacatcagaatctagtgcatgtctttgcaaacgtgtgtgtcattttcatatgtaattcttcataagagaaataggcatgatgacatttgcctttttgtaaagaagagatagaacgaattaatactgtagttgatatgggttttttttgaagcaggactttattatcttatgtttaattttctgtggaaagggatctcaaaatattctttaggtggggagctgtttccttttaataactgattccccagatcttatttcaactccgtttctaagagcaagaaatattcctcataagacaatgaaccctattgtttaatgattgataagatggtgcttgggcagttagtgtgctggagaagttacccctgagttagaggcacttaatttcctacaagggaagtaaatacccctttttgatatatatttattcctgtttatatcatctgggttgatgtccactcaactcacaagaaacagctgggaacacctggcagcagagagaggcttctagtcagagctagaatgtgttaggggaagggtagctcctcagacagggcccagatacctgattgatgcccaagctctttttcaccaataacagttgcaggagatccatgcattcagtgacaatttattttgcaaaggcttgctatgaggataacataatgcaggcactctaggtaaaagaacaaagagaaagatatgtcctctactcctgagaagcttacaccatagttgaggagacaaggcatacataattgaaaaactaaatatgaatataatggcaaagttacagttatgacaatatcagtgataaaacagtactatgaacgatacagaaattctgtgagtttataggaggtacaggtcagtgttggagagattatgaaaggctttgtgggagagcagatttgaactggaccatgcatagaaggatgcctaggagtgggagaagcagaaaagaggaagaatatttttggggcagtgtgaagcaggcgctgtgagcagggctttgaggcaggaatgggcatgacacgtttgtttatgtacctcatactatggtacgtgaggagatagtgttggaaagataggttgaattctgattgccttgaattgtcaggctaaggtgtctggccattttataggcagtggggagccaccgaagtgatgacaatgtaacatgcatagcaactggcattttgggagggggagcttgctttgaaggatttacaatgacgtcacttttacacatattgagtctggggatgagggacaatccatatgcagctacccctaacttcattggacacctgggtctggaaatgaggcgaaaggtgaggtctaggagctagatgtggtgtggagggggtagttgaaatggcaggtaaggatataatcttgaagggagagaagtcagacagaggaaaggggttggggacagacccatgggtgccctacaggtgagagcagtaagaggaagagaaggaaacggtgagaaactgggagatgtggtggctgggatgccaagaacgatgacctctgaggagagggggaggtcagtggtgtcaaatgctgcagagtggtcaagtaggagggtaaaaaaagggaccatcaggggttcagtggtagtcttagagcaatttctgtggagtggaaggggcagagctagtaaatggcctgcccaggtatatatttcaaaactggccttaagtccatatcatatgggaatgccttcttccctttgattattttatactaggtgggtgtaaccagctgctcagtgtaggagagagtgggagagagagggtgtggtgatggacaggtggtggcttaatctgctgatgattccaacacaaagggttcttggagaggcaggattggtgggtgcagtggaatcttattctctttctctgggccttcagggcccctttaggcttgactgcagctgtgagctgcattttctgttactgcggcattatcttcaagagtgaaatgtagggagtggatcaagaccaggcaagacacgaatccaacctgggcaccttctcctaggcactgcctcctttgggctagcccctgacatgatacctgacacgtggaaggtgctcactgcatgtctgctaaatgaaccaatcggcctgagcccacccgggctgaacgagctttgcaaggtgtgggctgtgttgtgttttctgagtcaagaggccgtgggggtggatggatggatgtgctcctgccggttgttctcaccctctgctcacccccatcagtgggagctggggcgctgctgagtcctcctgctgcactttgccttggctgagcagcaaggttgggccctgagggtgggaagggaggtagacagtgatgggcatgggatcctttgctgtctggggctaaactccgaacctccaaatcaactttcccaataaagcttaatatctattagggtaagcatatttttggcttttctctgggctgaaaggtgacctcatcttatgggaaagaaaggcttgaagtggtaatgctataatcttcgtgatcctagatacattgaaagaaaataaaaatgctgatttactaattaactccatgcatcttgtgtactgcccccctccccaccccccaaaacatcctaaacattcatgctgcaggctgctgctccatgcctccaataaactagctcttcaaagagatctcttttgtattcttcccttttccagctgcctccagtgggaggggatggctccctgctctgttgtctcccagtactctcctgtggtgcactccacatcccgccttgtattcgagccctttgtgggtatgttttcccttctcctcttttgaactgtaagtttttagaggctatgactgtgtctaatttatctctgagccccagaatccctgagaacaatgtgtggctcatcaaaggggattaatgagtatttgttaaatgggtttatgaattcatgaataagtaaacaaacacacagctctctcaggtatcatggcctttgggtctccagacactggtctctactatttttttttccttttttcctccattcctctttctgacctgatctcaggcacttacatgtctctgctcctctgtccatcccccgcacaacagagtgtgttcatccctggctgcacttctgaagttggctttcagaaacagagtctgtagacatgcagtgtttccagtgtgttaccgtggtcacagctactgaaggtgaaatgtacataacaagtacttacgtagcacatacttattgtgtgcaaggtactgatctaagagctttatgcatataaactaacttaattttcacaacagcccagtggagcagaatggtattattcttaacaattaaaccctctgggagactctctggttcaaggtcatgccttacctctctaaagctcaagatcctgcctataacttgactcttaagcaaggaaaatattattttgacatgcagtatgttaataatggtcacatattgtgaagaatcctgtccttattattaggagatccagctctgctatttcctagctctgtgcacttggacaagtccctgactctctgggtgttcagataacaggatgtgcctcacagtccttctgcaaagatgcaatgagaaaacattacggttggcacccaggaagtgatgggttgtcataaatgaatggtttttaaaacactttaaaaccaactttgctgacctgtggttagctgatagcatgttggagtgtggggcttctcaggcttaggtttgagagatgctgattctagggacggacattacataaggatgtgaagttatgttttcacccaagtaagggctgtgaggtattgtgaaagccaccagactcccaagatgtctgcattgccataatgctcctctgctccactatgcatttgcacatggtctcctgccaacttttttcttaagaacccactcccaaatcctctctgcattatgttccttagagcactgctttgcataagagtctatttcttggaaaagctcaacggaggaaaaatagaacaaaaggggctctgataacttaagcataagctatctgagtgtaactggcagggtgggggaagatgaaggagcaggcctggtgggaggggcacaggccatttggatgaagcccacattcacagacttctcagtgatgggtgaaaaatctcttatgaagatggcccaaggcctgacagatctgggaagagcttaagaatgagggtaataggccaactgcttctccaactttgccactcatgtccatctgtcttagtacaaactcccacaggctgcctgatctggggcagtgtggacaccttgttttctgccttttccagaagaggctggagggactacctaccagtccccttcacacctgattgcagctcgatgatacactgcagtagaggggctgcaggataaatgctttgaaatgtaatagtcttcatgggctttataaagtaggaaagttttccacttgcttccttagctcctgttgggtttccactttgcaggtcattgctttcagaaaaacatgtggagcatttggtaaccccatcttaacttgggagggtgtgtgtggggctgcactttccaactactgtgagatgggctggctgcattgtggtgaaatttagtacctcaacaaagtcccataggggagtagagggctgttgacaagaggtcagagcctaggaatatctaagctctgaggcatggtgcatggggtgctgggctgccaagcactcgtgctcagtgaccagtagatggtgctctgacaacaggaaaatacagttactgtccctctgagactggaaagggattttcagatggtcttcagactggtttccaatcagagttatgactaattgctgattttccacatttccatttgtggatccttaataggacagtggaactcggggcactggaaggagaatgcccaccaaattcccatatgaagaaattcccatatgaagtcatgcaataccgcatgactacagtattctggtcatgaactttttctgaggatcctcctggatattgagggcatggtgccaggaacacttggcctctgatcaaattcaatttgaggatggtaagcatagcatttccataggcttagtgtcattgtatagtttcttctcttgataaacaatttagaattaccctattgctgtcctgaagggcagcatgggttttagaaagagccgcagattggaagtcagatgtgttagaagtccacactctgccgcttatcagatgtgggcaaacggcttaacgttgctgaaactctgctgctttgtctgtcaagggtcgtgatacatgtgttaccaggctcacctcagaagtttggagtcaggctcagctgtggggcttatgtaaactgaaaactattaaacacatgtattattcaaccattaaaattgtagccactggcggggcgcaatggctcatgctagcactttgggaggctgaggcaggtggattgcttgagcctaggagttgccagctaggacaacatagtgagaccgtcgtctctataaaaaaaaataaaaacaacaactgtagctgccttgggggctggtagaatgggggattagagagtatgaaaccagtatagaaattcatagatctcaaagctctcaagagctatgacagccaggtgggggtggaagatgagagtctgtcttcctgctagcactgctgcccttaggccaagtctcttcacaaagccatttatgccattatgtttgcccctttcctttttggctgcaccctccaagaattatcccttttaactcacataggtgctgaaactccctaaggtattccacattaattcccaacctatgcatttatgattcctgtctccttggaaggcaagaaggcagatatcaactccagtgtgtcgtcgcatttgcacatgtagtatcccatcttgagtattctaggtctctgaagaattacaacagccaaagagaatacaggacgtggaatactggatctctgctgacatctgataacactgaagagacaagtcggggatctctgatgttccaagaactaagtctgggaagtaaaaggctagtgagccctgcttattctgggcattgagaaggtatgccgccagcctgctgaggcagaaccacaaaggaaaggggtgaggtgacagcatgagagtgaagttcatgaagctttctggcctgcaaggttatacaatctagtataatctagtgtaaaaagctacatgatttatgtcatcacccatcttgttcattatagtatcctcagtgcctaaaacagtgcctggcacctggaagggactcaaagatacttctctaatgatttgaatgaattttgtgctatggattatggtactgtctgaaaggagcgacatacacttaataatttctgaaagccctttttctaaccctatgtagtttacagggataccgagatagccacttgggactagttctaagtgactggctgatgggacttcatggttcacagcaccaccctccctccgtttcacgactgactaggtattcagacagaagaggaccctctgattaaagcaggaggaaggacagagtaaggcagtaatgtgaaatcaaagtaacaattacagctgactcaccttgaatagtaatttcacctgaaatgggctcccctgaatccaaaggtcaaatgccttccccaagggcagcaggctggacatgttgagaccattcctttggatttccagtagagaattttcctacacacacacacacacacacacacacacacacacactctcacatacattctcacacaacagacacatgtcagtgctcacagggccttgcccacagacagacacatacccgtagaaacacacatgccatgcactcagacatcacctcacttctcaacagttaatctcacttcacaggcgtgaagccatactcacccatggtttccaacctctgggctttggtcagtgtctgtttccttcctcagcccctcctttccttcttcccttccattgttcgggttggaaggatttggagaggcctatgtgttgagccaaggcaggaaaacacagaagacggtgtgccccagctagtgtggacatgggaggggacagctggtccctgccctcagttcaaaccaccagtcacctgtggggaagggcttggcggctaaacaggagctctttccctggggcttggagtccacctttcccacctctgcagctcagataccaattctatttttttttttttctacattaatgggttgggtttgagaaagtccgtggagcttatttgggagtaaaggatggggggcgggaggatccttctgattgttcgcatttcgagaagggtagttttagcccataactcaccatggagggcccttccaggagacgtcgggcagggctttcctacagcggaaccgggaggccgccccgtgagggcagaagctcccgccaggagccagcaccaccagcagagtgtggaacccccagaggtcctagcctcctccacggggcctcccaggtgctaagtggggagatggggagagggttctgccctctacttggaaatgcctggccgtgttcgtggagcctgggaggtgcggaggagcggcgacgcggccatggcgctaggcgcgcaaaggccccgacaccttactagggcggcggcgggcccgtggcaccgctcccggcaccgaacagggcacagcactggggacacctctctgcagggacccaagacgcgcgtgcgtgtgcgccccacgccaggccctcgctctcttgcggagactccgccgcatcgctggctgcacctgcctctctcttctcggcattacttgggggaaaggggactcttcactggacctttgcagaggtggctgctaccctttggccacataaatcaagaaggcaagccagcctcaccttccaggaacctccagccttccggctgcgtccccgcccctcccgcctggccagctcctcccccgcttctcccagcgctcttgcgcgcctcgctgcgcctctgcgcgccgctcgctgtcctctgcctcgcctccccattctccttccgcatcttctccagtgctccgccgagggcgctgcctgcggggaagagggagactgagccgttagtgaggaagttcggtctgtggacaagtgtggtgccaggccgccgcgaggctcggctgcaacctgttcctcgcccgccggtgctcgccgcccgcccgctcgcactcccgccctctcggcggcgcagccgcggatcgctgttgcatgctgatccggggaggcggcggtggcgagcgctccgggcggatgctggcactcaggcttcgctgctctctggatgctgctcaacttctagcccaagcgcaggagctttgaagtcatttgtcccttttcgcttggatcgacttcttattttgagattttgggcattgcggtttacgcaggaacctcaatatcgctctccccacctccctccctctttctccaacctttggatgcgtctctgctggcagatataaagacccaagtcttcgcggtggaatttcttagatggacttgcaggggctggcgttataaagcatgtcatcgtaaccccgtcctcgtctttgtttatttttttttaaagttcttttgttttcattttcccctccttcccaccccttcccccaaccaataaatcaccaaactgttacctagcgggccggtgcctgcctctctccctgaactaggtggtgcgtctgccagaagaggagctatgtttgaagagcagcctactccacccctctcctctctggtccctgaacaccaccacacactggcattttgaaaaaaatattttcctccagaaactgggcacccccaagccctaccacccgctttttttttcttttttcttttttttttttttccttcttgaggaatggagcttcgcagaggttgcatttagattcaacagttcacagcggcgggctgctgctgctgcctctccgaagagctcgcggagctccccagaggcggtggtccccgtgcttgtctggatgcggctctgagtctccgtgtgtctttctgcttgttgctgtgtgcgggtgttcggccgcgatcacctttgtgtgtcttctgtctgtttaaacctcaggatggctcgcttcggggaggcggtggtcgccaggccagggtccggcgatggagactcggaccagagcaggaaccggcaaggaacccccgtgccggcctcggggcaggcggccgcctacaagcagacgaaagcacagagggcgcggactatggctttgtacaaccccattcccgtccggcagaactgtttcaccgtcaacagatccctgttcatcttcggagaagataacattgtcaggaaatatgccaagaagctcatcgattggccatatcctttcttgcccaccataactccctctccccctttgcatttcttcgggtgaaggggggtacctagcatggaatgtatcccccaccccttcctggtgccaatttgcccctttgctgaagcacactcttcggtgcatctaaggggcaagcttggtgccgtggagacccgtttgggcactagtgtttttcaaggtaagacttttggttttttatttttcctatgtggaaatctttagtgtccctgggtgcatccctttctgggctgggctttgtctgattcccagccccctccccacccctactcccttcacatgccgccctctacatagattgggttgccccaatgcttcctttcataattaattctcattttcctttctttaagccagccactctgcccgtatccccaccaaccaggagacaccgcactgtcttcctgtagggaagtcaaggctccatgaggggatttatcagttcagaagttcccagggccaaaaccctgtgtacagatagacaaatgaataaataaaacaggcttttgggtggggactcagctaactctagggacttaagtttaagttccactgaaagtggcatgagtgagtgtctgtcaggggaggtgatctctgttgccacagcccaaggagctcaaacttggagttctcctctcagccaagaaagagcagctcatcaggcccatcctgtccttggtccttggttgggtactcttgcttcttagtgcttgacccagctgattgctctcccagtatccaggatccaggtggatcggctgggcctgaattcatccgctgaggccagaggtgtgcatgcagtctctctctccctagctccaaaggaactgctctccccaaagcactggtgggggccatctctgatggtggtggtgtcagggtgaacaggcatggaaggagcttctttgcaggtttaatcaagtgcaccaaatgcagactgctgattaggcagctcactgccttgttcttcactaaggattggacgcctggcaaggccattgggaattgggggtggtgaggcagtgaaggggattagtaggaggcaagctagtggtctggcgttaaatatggggatggggttggagacatgggactttgggagggagatttgggagggatgcatctgcaatggaggccccttcttttctcccctattctccctctttcccacccccaccgtccaggtgtgcagcagtgaggcagctggagctgccttgggtctctagtattagccagacacgcggctcatttcccccagggcctgggcatctccctactcccccaaccccagtctctggccttccccttcttctctagttccctgcctcagcagctcggtgattggctggcgcgtggtgcttctaggcagcaccccctcattagaaacgaaggagcatctctaagcagatattcttcctgctgctgttcgcatcctcccacagcaaccccggctgggcttctccctctctcctctctgcatcccgctcccctgctccactctcacagagtgatcccaggccatccattgcctgagttgaacgtatctagctagggtggaggtttcgggcgggggaggggtcgggtccctgcagtcacgcctgccggtgcgctgcacaaagcggacagatctcattgtgttgtgtgctgcggctgcaaatattcctctaggcagtctacggatttcccagctgggccctcctttctcactcggcttctacggttctctaaatcttcccatccaccaggtgctgccttgctgtgcccctctcttaggggcgtgtttattcagacaggcgccctcccgtttctttgcggtagacaaagccgcccaaccgccccgcgggtggcaaagtgtgccagcagccatcgttggcacctcggacagcgccgctgaaactcccggcggcccggggctccccagttacccgggttcagcacctcgggtacttctggccgggcccagccttggagctgagaaaccaggcacgtttcctacaccacgtggtcaccttttttcacgttttctcttccgctgcaaagacaccgcctttccaccaggcgttgcgagcgcgcaaggtgcggctgtgagtcttactcctccctttccttgtctttggccaaaaatggaccaaagagagtcaaacgggagactctcgagggagttgatttcagcatcatgctcagtgccttggccccgagccctgtcccaatggtctcttttgtctgcatagttggaaatttcacagtggttctacagcatgtaggctgtggtaacagtgttcagggaacatctgctaaggtgtttagtggagccctgttggaaaatataaaatacaccatgtacaatgtaattgactaatatattccctctggtggtgaccacgtggaaacattgggcttccgtgggaaacgcacctaaattcctagtctcaccttcctttcctttctaaacaaataacttcccaagtatcttgctttgtcttattgggagtcagtctgggtagtggttgcccataaagctttggagctaggctgcctgggttgaaatcctagttccttcaccagctttctgaccttgaaaattacttcattactctgtgactcagtcttcttacctgttaaatgaggataataataataatactgggagaattaaatgacttaatatatatcacatgcctaaaacattatctaattacccagtaatcactagttgttattattaatggcatctttcagaaatttcagcgtgcctgaagtggggaggggtcttagttcaggtgaagtcctctagattcttgcctctcaaagagagcaaggagctgcatccacatcacctgggagcttgctaaaaattcagaatcctgggccccacttcaatcctgctgaatcagaatctgcattgtaatgagatccctgtgtgattaatatgctcattaaagtttaggaagtacttctttgctctttgtaagtgccagattttttttttttttttaagaaaggaaggttgttcagttgttcagaaaacatgtcaagacctgctttcatattgacatttgcacatttagcatgcttgaggattttgtttgtgttacaacacgttttgagacttacactttcattggctgcagaaagtcactgtaggacgagggggataatgtacacttctatgtgccgcattagtggtctcatcatgctgtgcattactggtctttaatcatgtttgtctgaaaagattggttaagtaaaaggaatggtttaatttatgcttctaggatcaccccgacttggagggggagggtaatcttatccagttattaataggggaggtctagttcttatgggaagaaatgctcaagataacccagatttggcatgaaagatggtggcaagtcaacagcctactctgaatgtgtttcatttttcttggaagctacatctgcatagggagataattttattttcttatggcactttcctctgcagtggataccatactctttttaaaaatgctaatgtgatttaaaatgtgatgttacattctatacgattcctcgttttcattttcttttttgctcatctaatagatcttctctggcagttggctgttctgagtgccctcccatgttcaccgtgcctcatgcttaccagctctcactgtttcatgcccagggccagttaccctgtgggccatacagcatctctcatgtggtttgcaggatgccccacacttgtttgaacttttccaggtcacgggtgtgaaggcaagaagtagtgtgtctggcttggagactctatgccagagttgggcaataggatattccccccacacctccatcgccttggttgtctcagcaggggagaacatgcttcgtgtggaaatgaatatggcttacagtaggaaggtcaaatatgtttgcagccctgagataatgaagctcatcacaatgaacctgtggacattaatccatgatttcttattgtagagaatttcactgtatccccaaagcactctggctatggatcagaggttgtatgctttactactgtgaatctcccattgtaaaatgtccgtttattttggaggattttggtgagggttaccaaaagttttagttcttaaatctcccattttggtgtcttcttttcttctgcttttgttgcctataaatgtatagcacattgcaggatagtagactgaggtcccggtaagaatttcaggtttgatgtaactagtgaatcatgagtcaagatgccttgattagggaagatgatggcagctaacaaggatgaagtctgtaattatatcctatgatcagataatgcagaggggttcatatcttctgtgtacctgtgcgtggatgcagatggtgaaacagatagtgactgcagctggtactggagctgtaggagaaagttcttcattttctgagcatcccaggacaatctctgaattgcctgttggctttgcttttgatatgaagtgtgggtaatgtttcatgtggaaaccaggccatgacttgttgtggggaccatttataattgggatgaagcctgaaaaatgagttggagtgaaggaatttgacagaaatgaaatgacttgaggatagagacaaaaatatcctcaatgtgatagttttgtctgttggtttgcatgtcattatttctccacttccctccacttgctttttctgcaataggcgcagtgcatgctatgaattaaaggaggaagaggaaagtaatgagaacaggcctgctttttttttcttctgaaacatccagactctgaaattattagctccatccaaaattacttatctctttatagcactgctgtacaaaatgtaggtgtttttccccctcaaattctgctgctttcccccttctttataggaacatctggtttctttcaatcttcatattcttagtgaaaataaaactgagtgaagctttgctaagctctcagaactcttgcaaacccttgactccatgtgtttgatgagcaggtcagccacctcccttacgtcatgcacagggctgcctggaaagctacagctcaccaaacaccaaagcccagatgtgcaatccagtccatcaatggtgactctgctgatcttattttgcttatcactgaccacaaagacataaaagaggaaacctaaatgcaactctaattaatatccatttattcagagagagagagagaccaggtctttactttctctttctgcccgtcttttcatctttctatatttctccctctctcatttttaggttcagcctttgtgaataattcattatatgtgtgggtttttcctaggattttcagaaaaggaaggttatttgtcttcctcttgggtaggattattaaggtctctcacagaggaccaacttcaggaatctactttttctctaagacctttgttttctgcagtgggactgtcacacaacagaaaggaagctggggagaaatcttgtaacctgctttttcttgtcatttttatgatgactgcctcctacccagccctgttacatttgagtgcccccaaaatatgcaactactagccttttctactcagagactgtggttaagtggaaggtacgtgtcactctgaatcctctcatcatcttgggttttcacactgataaatgctgaacgactaggctaaggaacagtcctctgtaaccatttcttttcaaattccagtgtgaatttttacaggaattacagggagcaggggtagttatggggaccaggcatggaaattagtgtctaacactccgccaccactaccaccaccacgatgtggcttctaaagcagtcccttccacagagggatagaaacatgaggggcttggatcaatgttacttttcccaagccttctaaacatgcacagagaggatgcacgtgtgggttcacccatcagtcatgtttccagcatcaatcttaattaaggacagaaggtatagcacaaagtttttagactcccccaacctcgtggtttcttagtgttaaggttattgcagagagatgtttatggtgtatctttgctcactgagcaccccaaatatgtttccttataaagcttgacgagccccagtgtcctcatctctggaaagcagggagcagctagaagatgtgttcttataaggtgaagatgggccagattaaggggaacagcaatgaatgactttaaaatgtgtcggttatccaagagatcctccctgccacctcccagagcagtgggtacttcttaggagcttcctttattgtatcttgagctccaaatttgtaggactagatagttccacccttaatcctcttacttattaaaaaaaaaaaaaggagcctcaaatagacccatttgtaaagcagtagttaatcccagaagcaggtgggtggggcttgggaatgctatgcccagctaggctccagccacgctccagccacgtgaggcttcagagagaggccctgcctggcacctgtgccaagcatgttttttttttttttttttttgcctgtgggtggttgatttgaatcactgttgcaactctgcataatcttgaggctatatttttgtgtgtgtgctgcattttgtcttttgctgcatttttgctgcatttgggctgcatcggttctcttcatctctggagaatttggaaagcctccttcagatatatgcctgagctttccaaagacttgtgtcattaaaggggggtgtcatctttcttccctttgggggagggattaaaaaggatgtagctggatggtaggtagcaggctagaggggaaaggaagaagtgctctggtgtagatcatgggtggagccttgatgatactcagtctattatggcatcattgctgagatgcaggacatcgtgcgtggccttctggatccagagcggaggctctgaaaaccagcactaggaggaaaattaatactctcgagcctttctcagccttcagctttgctgtaggttggaagtttttcaaactttctgtgcctctttctcaatttccacaccattgtctcatgggactggtcagagccaaaaagcatgaaatggattttcaacagtcactcactaacgtcctggcaatttccagctgtgttctcctgggaactgttttgctgcttttctatcagcgaccattcctttcagcagatgatttccatcaacatcaaggctaattcctcatttagttcctttgtgttgatgtcagacataggcggtctgcccgtttcatctacactactggctgtcaacctgtgtctcagaatcacctggagggcttgttaaaatacagattactaccccccactcccagagtttctggttcagtaggtctgaagtagggctggagaatttttgttggtcacaatttcccaggtgatattcatgctgctggtcttggacatcatgctttgagaaccattgctgtacatggttttgttatctgcctggcaatgcctttctagaaggccagtcttacaaattgctgatgcatttcctcatcccaaatctctctcatttaccagctaaagccctgctgctaacaaaagcttatgctttgggtttggatagtgaggaggctttgagacttctctaacaaaatgctgatgaccttgagaccagggacatattaagcaaaatatatgtcattatcaactttgagttagtttatcttgttctttcaggacttatcactgagagcaggctcttctgagaagggacatgcacccatttaattccagcacctagcacatgctggcacatggtgagcattcagtaaacttttgttggatgatttatacccaaattggctactattgagttaacaagcatcaacaaagtgcctcatattgccctgaccaggacctgtaagaccaggtgtagccccagggaggggacaggaggttgccaggaggtggtgtgagggcagtggatggctgggaggggagtgaaggatcatcacatgggaattgggaggctgtaaaagacaagatttagctacttcataattttcctcaggattctttcagtttctgtattacttgatgcaggctttctcacggaaaacaaaacaaaacaaaacaaaacaaaaaccagggtatttgttatctggcattttgttacatggaactctttattaattggcatatagtataatgacaattgagatttgtaatggtgaccccctaggtaccacagaatgttggagtgctttctgaagagcattcattgtattatattcaacacagttccaatggtgtgtgcacttcattgtattttgagctttgtgtgatttataattcatattgattatataagtagctcattaccactttttttgttcaattaaccaaagtgttcttctccagctgtaccagatgacagaggaattggtatgttgttctagaaatcagaccttttagttctagaaatattataggagctggaggtgaatcctggtgcaattgtcatgtatcaggtgatatttagaacaaagtcattatttcaaaaatggactaatagctcagcaggctttagatttactgggcaagttccccagctggtaagctggtatcacatctaactgggtgtgtttgtttctgtaggctaacactgaaaatgaaccaccaagatttccaagagagctttcaataagcatctcagcaagaggttgtcagatgataccttccccaacctgactctgagttatccaacttttatgccttgggcttattttcctgctcttttttactcccacttccctccttcctgaaggtcaggagatgttgagctctaaaatgattctgttgtagggtgatggtctttaggttcttcagggtcagtttgaaactctatggaacttcagagtatgacctgaataaatgtctgagtagtgacctgagtaagtgtctagatgacctcagtaagtgtctagatggcatctagatgactctttttggagtgttgggaccattaagtccctctagtacagtgtttgttcatttgctttctatactgggatcacaaatcctactgacatctggttgatgctatagacctgtctctcctgaaaaatacacatacaattttgcattcaattttagaggtctatgaatcacaatttaaaaacatctatcatgttaaaaaattcccacaatttgggatgttgggatgctgggctatcaggagtagtgattctcaaccaaatatcaaagcctttatgagcaagtacgacaggaactttatatgaaggaactagagagatacggttgcactgggctgtcagccaggctgctatgaaagaacacaaacattctaaccaaagggcatgaattcaatacagaaactctttctacatcactgtgaaagacgactgtcaagctggaatacctccagtgacagggtgctcttctgttgttaaaaaacttaagatataggaagtggaaatattcctccttatagcttccatttgttctttcccttcctgttttctgttttgtaaaacaatatagactcagtctacttcctttcacttgacaatactatggcattgaacagcacagttggtggatttttggtgatgatagacatggctcttggcacatgtggcccttaaggacttgatatgtggctaatgcgactgagaactaaattttaaattttactgacttaattttagttaagtttaaatagccacatatggctagtggctactgtacaggatggcacaagcagagggaatacatgatgagtcagaaagcttaagctcccctttggttctgtcatttgttagccttgtaactgggcagggtctccttggcttggtatgcagggcttctcatgagccactctgcacattgcgccagctttccttgaccactgtaatcactgtctctccagctgcttcagtggctgctgatccctgaaggcaccatcctcttccaggcctccgtgcctttgcacttgctgcttttccacctagaatgagtctggctttaagattgtactcagaggtcacttcctctgtgaagccttccttgatttctcttggccgaataagaccagcttcctcctttgggctctcatagggcactttatttattactttgttgtatcacataccacataattttagtattggtttaaaatccctgcaagggaggggggacgttatctaattaccagataataaggcaatgcttattaacatcagcatttaacacattagtttgaattaaaatactttttaaagtggtgtttttttttttttttaaagaagtggcattccgtttctgacttgagatagtcagctaaaatctctgaatctttttttttatatgaattgatgacagagttagttttctctcactctgttctcattcagtttaatttttgaatctagattcaggactctatgtttatatcaagtatattttatctccttgcttttgctccaatgtttatcctgcagagatccttttcaactgagaacaaagaactaacattcattgagcatctaccaaatttcaggctctacttcaaacaagtgtattatccacattttaaatatggggaagctgaagctaaagaagattaaatcacttgcccaaggtcaccaccggtgagcttgaacaagtggtccgaatccaaagtttaagtgatttctacaccgcactgtctatggactttgctgtttcatgagtgagctccccaccctaagtgctatgtcatctgcagatttataagcaaatacttaatgctttcatttgagtaattgataaaaaatatatttagaatcagggaccctctttctgcttatcatcagtgtattagtcagtgtgcgttgaccgttcagcttttctcaagtattctgaactgtgctttagcctactgacatttctgtattttgtctgtaaaaatattgtacgcgatattcttgtcacatgctttactgaaatcagtacacactttcatgactacttcatgtctattttaagcaggaggtagcatcttggtttctccaaagtccactttaggtatcattttcagagactcagacaatattttatttctttcttagacaataaaagtgttgtgtcctagatctcaggagttgaagggatattagatgtcatctagtccaatgcccagttgatgaaagcttcaccttagagttcaggatttaccagtctctgcatggaagctttagggtattagggggtcgttgttaaaaatgacctctggattcaaatctcagtatcacctctgtcactttatagctgtgtgcctcaggcaacctgcttacccttgcagtgccttggatttttcaaatgtaaaacagagatagtaatttgcttctggggtgtatcataggatttttgtgaaggtcagatgagataatacatgcaaagtgcttggaacaatgtttggcaaatagtaagctgtgaataaatcttggttattagtatatggttaatttcagatacataaacattaaacttctgcagctatgttttctctttccaacaatgctgtcctacttcctcctggctcttaccaagtttctaacctgagtgctgccagataatgtttacgtgaccttgcattggtttcatcacctccctgagcctcagtgtcttcagatgtgaggtggaggtcactttccctgctttgcctgccttataagactgttgtgaggttagcattggctaatgtgtatgaaagccctttgcaaacatattaggtattagtattagtgttaatgttgatagaatttataaatatataacacttattgaacatttactatgtgtcagaatactgtgctaagtgctgcccatgagttattgcattgattcttcatgacaatcctacagagataggcattcttgttttctgtctttcatagttagaaggattaaggtgtggagaggttaactcatttccctgagatcgcacagtaagagctggaggcctggatcagaactcgtgctcttaatcactgaagctaaatagtctttccataagactttttttcttccttctcaaagttattgggtttacacttttaaaaataaaatttaaaatatctacatcaaaacctgtttcctttatatgtttctaatgctgattttataccagtattgtacctaaggacatatttggatttacaatcagaaaaaatatcttcaggagcaataatgatgcagaattttcccagaaagcttttgataaaaacagataggatacttaaaatgatctataaccttaacagactcacttgattttgtctttgaacaaaaatggtagcaaaaaatttcagatggcttgatggatggcatgtagaaggatcccctttagatccttggcatctgggcagattttcttcctgggggttgccagcctcctggctaactacttcctatctgcttaggcttcttgggtatttagggcctctatgtttgttctatcagataagagagaaaagattggaattcattaactgtggaggaagcttctgaaagggttagggtgctgtggggggaaggggaaacctccattgcttgggactcttggaaatttgcctaatgagcttggtgaaggtcctctgctagggatattaggggcattttacctgtgggaaatgtttactggtgtggacgagaatggagaattaggatgcaccacttggcttccggaaaccagacagagcactcaaaagaaattaaggagtgggcctaaaaagttaaaggaactgcctctcctttctgctaactttggattgtttttgcatggaaatttgtatttgtgaaataactgagccatatggatgcacaaggatgcatgtgttcttctagtctgttgatatgaggagcagttgaagggtgtgggcttgtctggaggtggggtgagtaggtggatgtggtaacatgaggagggagcaggtctgaggaatatgggcctatgtcaatccgaggatctgggcattttggcaagagcaccctcccttctcatagagaggtatttatttatttttgagatcaccatctgccccaccacctccccccacctgaagttctatggataaggatgttacatctctgggtaacctctttccctggcgatgattaaagagtaacaaatgcccactcagaaagactgtacaggctgagaaagactgagctcatttctgtcacaaacatcagtagacaggctcaggagagcaaagcaaaggaatagattctaggaaattagaacttctaacagctttctatacttccactgtgaaaaaggctgggtgcagaacaacctgcataatcatatgccttaccatttctctttttatcttaccttcgtgtctttttatcatataattttaccaccattctataaggacctccctccaggcctggagagctttctgttcctcaatatgcatccctgagaatggatggaggaaactaacctttaatgaatgcctattgtatgacaggcactctacagtgtgctctagaggagtgtatcatttaatccaaccccgggtgaagtggatattgttctcattttatagatgattagcttaaggtcacagatagatgtggtctgactggtgccactggctgctctctttccattgtttcatgctgccttgggttagaccagaagaccagcaggtactcttccctaacagagtatctttttaggatgacactgtgaactacttgcatgcatctgcagcatcactgggtatgaggctaactcatgaaggagtgaaggatcagtagatggaagaagagcaactatctctttcccatcattatggtcatcatgaaatggacctgagacatcctggcctgggtcactggaatgcgagcttgagtcggaatctgagatctttgctattttgtctttcccccgccaaaactccactgctgcagttcctttatctgtctgcagagcgcgtttggtttggaaatgccagttcccctttcaatattagcatggaaagtccattttcttttttccggttctcagagaagtctaccctcagtcctttctgttctggggtacccatagtgtgagtcatagtgtggaggtggcagctttcatgaccttctcttgaaattttacatactgaatgcagctttttaaggaaatgagggttgggttatagagagactgcagaaagactcttatatcctgataaagactatagaagaggcttatagtaggtttgtggaaaagggcagcttttccacaatggttcacttccaggccaccattgtgaagattctagcttttctttaactctgttagagaagctgctagcgaatccaactggtcatggagctcctatgcttgacaatttagaagtatttccatggactctagaccctttcaagatgtccctgggtgtgccaggatttccatttttgaatgctattgtgggatctcctcattagtaatttcaccaaaaatggcttctctcagttgtaatcatgtatgctctttctttctcctccatttcccttcccatcatgttcctcattagcataacagaatactagaatattagatttatagagaataaaaagaaacttgaatcaaactcacacttatccataagaaaactgaaggccatagaggttaaatgatttgcctcaataagtggcagagcagagcctagaacccagggccgcgaccaagtgccagcatccttttgtcacattttctcttctttcctctgtaccctttctgtgctcaaccatcttctctctagtcccttctttctcttctggggcttcctcatccttagcaagtatatgtttttggtgtttggggcataggaggctggatataaggatcatgactaataagaaaggacttacgtaagaaaaaataggaatggataagagaaagatattcatagaggtgaagccaaccagcagagatccagtgagaattggtaacagtgactcagaaaaatggttaatattcttctttcccaaatatgttgctggagaactttgtgaaatgataatataaaactcaataggcaatggacttctacccagtgtaaaaccaagagcagatctcagcagatgggagaatagatggatgcttaggcaagcactcatctcagaatggttgctgggctcttcagtagccctaagaaaggcaaactatccagactctgccctgagaggtagctctttgagaacaattgagtactcctgggaaggaggaagcagctcaaataaaaagatctttagatccctttcttttagaattctctattggagctaagagaccagggaattttatttgattattctgataatagttttcccaagcttttcagggtgtagggctgagagtacagagaggtttctagccctggttctagaaaaatctcattcctttcctggtctcagcatctacatctgtaaaatgagtgtgttggaatagttactaagactctaaggtgcctttcagttcccactgtagagactctgggattctagtttccatcattgttatttcagctgattggaggacacgattaactttcttggtctccagcattcgaagcctggctgcacattagaataagcctgggaacttctagaaatgctgatacctagactgcagccaagacaaattaaatccaaatttctggagataggacccctgtattcttaattttgaaaagctttccaggtgattctatggtccagccatggctgagatccactgatcttctagaccgaggggagccagttacctgacttccttctgtttcttttgagtgtactttgattacgtcttggctgctccctctcagttttcttgcaggctatggtgaaatagcaggagccgcctgggtgtcttgaaatttagcctgagagaatggggtgattaattcttatgtgtcactgcattgacaaagccattcacctgtggctgcttccgacacacctccagctgcacaggtaacagccttctgtgatgagggggatggaccagacatcctgaatgcaggtctggctgaggaggccatttgaggctgaaggacagagtaaggctcacccaggaggcccttgagcaagtgactaagagttgttgaccttgcttcctacctggttggttcaccccttatgcatatgaaggttgatccagcatgactaccattgaatacagcagtcaccgccttaacatccttgacactcccctggggatgtggaactcacaataagtgctgtgctgaaactggcttgtcccagctcttgagtgtcctctctgtatgtctcttctagactccatgttcagtgatatcaagatggtagcttgaaattggccatggagagagtatttataccccagaaatttgcaaatgctacacattggggcttttcccccgaagttaaacatctattagcacaacacttagttttctacttaacaaaatagtccattcacttgtggaacagtggaagttcttctctttattgctccagatctgtcttcggatgggtactctgcacattgggtcttagtctttgcctccataataacttagaaaacatctgagccccttattacaagctagcccttcagatatttgaaagcagctgtgatgtatttctcaagtcttccctttccaagctgagtatccctagttctttcaacattatctcacgtggtttgcaggctcagtaggtgtctttgaatgccagggcacagttgcagagttttcagaggaaaacaaacattctcccacaggtgatctatggactctttcacaaaaggcttttcatttttcttatgctgtctcagttccatgatgctggtgttgatatgaagtggggtgtagtcttgggtggggttgctgattgcacctcatagtcatcttccctgaaatgcacgttgctgccagaactcttgatgggctccaattcatcagagtgtcatcaaaacacaaattctcgtttctgaaacaggtaattttcccactgctgttttgttttcttccagaggcttttaatgctccccttttcttttttcccttttctgtagcgttcaatcatttgtctgctgttcaccaaaactgtgtgttgaatgacagcgttttgagtccaggatccagtcacacgcaaaacaaatgaatttgttaagacttatccagctgtctgtaactgcaaggggcatggcagtgggaggagggagggagacagtactgtcttattttctcagaaccagcacttcccatcctttgggaatcagggcccagatgagtctggaactgacctcagtgttggttcaccaaagtagcaatcatgtgcacttcctttcagccactttatccagagggcagggtcctgggagtcagatgggagttctttggtctaaagtaatgagaatttggacttgccttcacagccagcattaaatgggtaatgcttaggatcttttgctttgagtaactgagtccactgacctccatgagagagcagcaggattgtattggcaaacaaaaggccttttggggagttctctgcctctttgttatgttctcaatattgctttatttgtctttcattcattaggtttttaggagtaggtgtgatggcatttccatcttcttgacagcaggagtggggaagagagagagagagagggattaagaaggagagaggtgtgtgtctgttcaggactgcctgtcagatggtgaatttgaacagaggcagctgttgtcatggcgatggcaggttgcatcccaccaccatggaaaccaaagttaaaaaactgatgttaaggctggaagtcacatgatacatttttgttttgttttgttttaaaaaaagaaaaggggtttggttttttagtctttttttttaagatgaggttgggtggtgagaaaaattgcacaaggaaagcaatgagatgatgacatgggacagtatggagtaggcagagccttctttcatgtttttctgcttgttgacagtgcatgtctcctgccgtggttagagaggggatgggaggggtatgcagggtggacttccaggtttgcagccagagttgtacactgctaactgtcacatggagaaacacaggggtttagccctcttgccctttggaggtgatgtgtggttcaccttctgttgatcagcccagaacagacccaggaaacctaaaagtatggactacccaaataggaagatagtccatatattgataaatttggaaggttaacatttattttcagagaattgaaaagttcatctatagctcctcagaatctccaggaatagttctgtctgtttattcccttttctgggctggtctcttttgggctgccatgtcctgccagggcagccataggagtgagtgcaaagaagtccagaaggagccctgggccaagactccttgcaccatagcttatctcttaacctgggccctctcacctgggcagggtggagcggcttgctgagaggcattagaaagccctcttggctctccatctttttacctcatactgacttctactttatgccatgatctggagaaaatgtgaaacatccctccaggaagggagctggactggccagggctgtttttgcttgcttgttctttttttgttttgttttgttttttgagacagagtctcaccctgtcccccaggctggagtgcagtggtatgatctcggctcaccacaacctccatctcctgggttcaagctattctcctgcctcagcctcctaagtagctgggattacaggtgcccaccaccatgtctggctaatttttgtattaattgcagagacagtgtttcaccatgttggccaggctggtcttgaactcttgacctcaagtgattcactcgcctcggcctcccaaagtgctgggattgcaggcgtgagccactgtgcctggccaggccaggcctgtttgaacagggctggtttgaattttccttttgtgtagacaggttaggaagcagagatttctgtaagaatgtctgcttctaggaaggtgaggaagaccatgagggatgcagacacactgttgaagtgatggtcataactattgctatgtctgggttttaggcacaaggtcttatgtcttcggcattactcgtccctccaggacagatgtatctttctcagtcggctcagacgagggtcatatgatctcaccagcatgatctcactgcatttccatcagggtctgtgggaactggagccagacttctgtgatggttcaacccctcctgttcttagccctggcctggggtgtgattaatatcccttctaatcactgggagagattgcatcagagccatcagcttcataaatcctcctctggggactggtgtttggatgcgctttccatattctcaggaggttctgggccaaatgtctttgctcttttcctggaggcccattaccataattttcttttaaatcctttattggagttggtctcctctgtgtcagtccatggctacagccagccagcccactcctgagggctggaggctgtaaccaccaacagatgctttccccaaagtattgagccacagtagatgctgaaagattgagttagtaggatactgaaagtaactgtatttgtgcaacactttacagttttcagagggagttcagattccggtatcattttaggcttcagtccttttgtatttcttgtttggttctgtgggaatggatggtcataacccttcattgactcttgagtactgtgttgggacagcttttgcagtcggaggcctggctctggtttcctttaccaagctacattttttccattgcattccaggtcttgaagaagattctgaagttacacggaaggcttggatagctgtatttcattcctgttcatatgtaaaatgtctatttggtgtcatgctaatagggaatcacagactagttaaggctctttctctgttactgtctttgagtcaaagtccacttattaggatgatatttatgtgcacatgaagaagaggtggaaagacatgcatgaaggtgtccatgccatcctctgaggctgttacatctcttggatttagacatccaaaaacatgagactgaagggagaaaaggagacaggtcttcctgtagggtctggggtgaggggtggaaatgggtaaaggaggctgaggaatgcctcccctcagactgtggactcttctatacccccccaggagtttccaggaagtgcctgagtgcccaccgactgctccccacaaaagcatattctgcattaggctgaagttgggagagtgcacagcattctatctgcctgcctgtcagagcatggccttcttagtgttcggatgtcataggctctgggaggagacagctaagtacagaggtcttcaggatgagccccctggtggtgatagagatgcatgtttgcctggggacacccaatatttactgcctgaggcctaagtccttcccaagcatgtacctacagatctgtacctgagaggtgatgatgaggaggcttttcaggctcaggcagatgaagagctcagctccaggccaggcccccagggctccggtgacagcagaaccagcatcaccacccttgccccagctttctgtgcttcaagaaggaaatgaacaaatggcaggtgtgcaggccacgtcgtgctgctcaaattagccatgttgctaaggaaacaagtcaaccattcaaaggaaggagcattgggtaaaggagataaatcaataagtgaacctatttttatcatttccctaatgattgtcttgaaactgctagactagaaagagagttggagcaacacaggtcctcattaatgggctcagagggaacgaggagtgaaggggtgtttgaggagattgccagtaaagtttatgaaatgaggcctctagtgagcagtgagctggtacaggagggaaggcaggaaggaagatgtcttttgcaagtttcaaagtggtttcatggtcatttcctcattttggccaggtcccttcattctcttgcatttaatcctctccgaagtctttttctgatttctctggccatcgcattcctcctcactctcaggttgggatgggtttttgtgttgatttgttcttttcaggatacatatagctttaattgattttgtagtgataaatgaacacatgctcatttgaacactcagaaaatggttagaggagtaaagaagaaagtgaaaataaccctgctaccgagagaagactcatcatccttccagcaagacagaattttttcttgttctctcccttctctttttttttgtttttgttttttttgagacggagtcttgctgtgttgcccaggctggaatgcagtcgcacgatctcagctcactgcaagctctgcctcccaggttcacgccattctcctgcctcagcctcctgagtagctgggactacaggtgcgtgccaccatgcctggctaacattttgtattttttttagtagagatggggtttcaccgtgttagccaggatgatcttgatctcctgacctcgtgatctgcccacctcggcttctgaaagtgctgggattacaggcgtgagccaccgcacctggccttctctttttttttttaaacatgaaagggatcttccatgtatgctggtttattttcttttttaaataggtcatgtgtgtctacagtggacagtataaaaagttcaaatgggtatacagtgtggagagtgtgggtaccttttgtaaggatacctctggctctagtttccctgtatgattcatttatcaattgaatattaatttattaataaaataacagttaccggggccccactgtgtgccaagtacagtggtgagtgaggcaggcaaggtcctgccctggggctcccagtccttactgccccatcatctccatttgttcaagatttcaaaacacaagcaatctggataccagggatagatattcttccctaaaatatgcacagtgtcaggcacagagtgtaatgagtgtcactgaattctagaacagagagtcagagtcctggacagacttccatcttgtccctgattgtggttgccatgaagggtgatggtctttgaggccgtggcgactcggagctccctttgacctttctaagtcatgtctttgtccagtctgccaggttgaggggcactagcttgactggtgggtgggtgttatttgccgtctaggctcttcactttggggatgtagcagagccattgctttggggtgtgaagttttgctgtcgggaagaaatgggagtggtgcctcggaggcagcctgcaagggtgggagtgagcaggagccatggctcaggccagagtgggtgagcaaagccctgtctttgtaatggctccttagtgaatgcctcatgttcattcttacctgcattgaacattgactaagctcctactatataccatgggctctgctaagcactgccagtagagacatgagcaaaactcctgctttcaagatatagtttcttgatttaaataggagaagaaataatacagtcacacaattcaaagagctgtggggcacggggagaaactttcactgacaaggtggcatttcagcttggtcttgatgtatgactggaaaggagaagaaacgccattgcatgtggtggcagaagcacctagatgtaaatgcctcttttttgtgctttcttcagaaagggaagtggaaaagagtttaaagaacagggctgtaagggagagtggctggggcctaggcagacttggatggtctcttctgctcacctcccctgagatttccctgccactatccattctttcacctagcccacagttacacagaatctccacattctcactgcaggttcttcattaccgcagccatgaattcatcctgaggtctagatgccctataaggctgaaagggacatccctctcaagggcatatatatctgaacaattttaaaaatgtaaagcaaaaaaaaaaatatttttaagccagaagattgctgctgtgaatgggcctcacatcagatagtgggaagaggatttggctggagaggaagtgagaatagggtcttcttagaacctgtgaattaccaaactcccacctttagattctagactttagggccttgggtagcaccagccatcaagacctcatgaattctcagccacccagatacctggccagtcactgggagtttgactcatcagcacctgggccaagagccattccgctgcctggagcatcttccggtggtgttggctacaccttcctgagctagcctgtgtccccacaaacctcacatatctgcccttggacattctggactagttgagcttaaaggtccttatagggagcaatatacttgggttaactggctaggaaaatgcaggtatgggtgtggaagcagggagctggggcagtggaggaactgccatggtccaaggggatattgtgagtggagagtcaggggcagtggaggagctgccatggtccaagtgggtattgtgagtggggaggcctcggaggcacatggctgccaggacctgtcttgcctgcaggctcagcactgagaacccatctactttgaagcctgtgcttatcactttcaggttttcaggggaagaagattcaaccccccaaaacaatcatagaccccacatagacccattagaatgcgagaggtctgcagcttgaacgagaaagtacttgtgcccagtcctaccttccagggcaggcactgggcttcttggatctgctgagcaggtgtctgaaattgcatgagacgtttccagctgtgaggagtgaccaggtgagccccacactgttgtgaacacttttgttaggaaccaggacaggggatgacatggaagaggccctggtttcactccagtcagatccatcatccctcctgccccagctcttggggactggcagacagacccccactttgtgtcaggctgcccaggtatgttcctgggaacaccgttcaaaagagatgctctgaaaaaaagagttacaaggtgaagcaagtttgggaaatgttgtgtgctgtcccaaacgccttgtgtgtgtgtgtgtgtgtgtgtgtgtgatggggtgtgtgcccactgtatgcaaaagtattaaaggccccaagaagtcctgctggggagaaacctgcttaactttgcccaacccaggctttctctcattggttgattgcaagttcctatagcaccagtatttcatggcctgcatcttaggaataccactctcaacgctctcaacttctgttgtcttttgtcagtgacttgtatgcgtgttgccagttctctttctggatccatcgcccaagcatgttttcaggaaagggtatggattccttggccaccattgctgctgggttcccatctttaatttgcaggatgagtctgggattccgggtgcctatgccaggcccagggcaacctaggctgttcagaaggcttatgggacactgggtccttgtgtggttcctggttgctctgcattttttcagaggtctgggttacagccatgatgggaggggaggagcactcctcctgcgatcagtgggcatgggtggcccttggcaggctgtatgttgggggccagtccttagaaggtggtcatgctagctgggtgggcgtctgtggtgtgtgtctgctggcatgtttggctctcaggggcttcacacccggagtgtttgaaggaagaggaatgcccatgggtgctgagggactttccatgtggggaggctcccctctgagtgggagggtttaagcaggcacagtggggtgtggaggcaatggacaggctctgaagtcccctgaggccaggtctgtttttagttccggtggctgaacctcagggcagcagaggcccgtggaatggtctctggggtctgtgtgctgtgtgagtgctagaggtgcgtgggaaggaacgatggtggtcagctgctggcgagtgagtgtgactctccagtgtgactcagagatgcatggtggtgggggaggagaaggcactgccaaatgaggattaagagaaggactaggggctcacacacagccagcatctcagccctgcagcccctgatgccagcaccaagaccagagcaactggtgagcagctcacatctcattgcacacactgccttgccctccccagagatgccctgggtgctaacttaacattgtgttattgccacaggtagcctggcaggatgggggcattgcagggatagctgtgatttgccctcctgaactccacgacagggttccaggccctgcaccctacacagcctgtctgggtatgtggggagataagaacagtccctttccttccctccactttgccagatctacggctcctctcttctgcctggattccagaatcttctggagcacaggttgctcagcaagaccagctgcagtagctaacttgtgtttgtcgtaacagtaatcacagaatgaaattccaacatgcagaatgacagcactgggagctggtgattccctctttctcttctgagagtccttcccacctccctcggagcatgtggcaaaaccttcctgcaggggtcatagtcctgtttttgaaaaggcacagggagcacctcacctgttttcaaaaacatctaacagaaaaaagcctgcattcattcattgtagtgtggttcttacaggactggactttgctgtccaggattccagactcgtgatcagtctctgtttcatatagatgcagacacttagaagaaaataaggtgggacaaagcaagcctctccttcccccagaagtacattgctgagtggaattttaaaatagaaggaagctcacatggagagaattgtttattttccagatgttcttctgttactcagtggtgcagagattctagaagagaggactccagttgtgagcccaggagagcaatggattgcagcagctggatctgtgcacaagcatcgttacccagttcagtggtttgaagactggggagaacaaggggtctgcgatggcattaattatgtttcttcctcctttcttcccccttctattttcagccttggttattggatttgttattgaattcactcagtagctggagtgtctgccatatgcccaactatattatgtattggctatatacgttccttttttggagaagatgctttgtgttcagagaccaggcacaaatgtttttggtttcacaaaaccaaaagtggatgctaaggaccatccactgtcttgcctgcctgcctgtttacaaataaaaatcatgcaaactgcacagacacaatgcgggttgatagagttgtgtgtttatgggcacggccatcttggaggctgtgtccctctctggtgaatttgttccttaactccgctttcccacgccatttgagtacatgatcctggccaccatcattgccaactgcatcgtcctggccctggagcagcatcttcctgaggatgacaagacccccatgtcccgaagactggtatgtgattcccctccttctcccctttgccccttttgtctttcttggtttcttctcctctgctttatcactctcccattcccttcctgcctgtgagttctgggaggagtttgctctttgctgggggacaagctaatgacagaccccatggggattcacacggaaaagaagagattacaaacactgtgtctgtgctgcgtggcagccagggaagaagaaagggcaggcacaggcccattttcttccctcctctttcctaagggacttctgatacgagaggaagaggtggggagtagaggggagaggatgaaggatgctcagtgcttgtgtgtatttgtggttatgaacttcccaatgcttacgtccttattctccttaaagaaatgagtcacacatctaacgtattccccctaaaaagagcagacaaactgcctaaaattcacgtgtgtacttgagatgatgaccttcaagcttctaacttatgtgaagagcagcaaactccttcagggcaaagccagggccatcagggaccttcctgggaaggaagtctagcccctgggtgtgaccctcacattgtccatttctacagctggctcccctgggtctcccttgccctgtgcactcctgagtcacagacagcctgcaagggtcccttagcacccttgcttcccacctacacatgggcaggcccagcacagacatccaggaagggccaggctgtgcttttgcctgtgtctcataaagcacagtcctcttctcactggtgcttctgctcctcatccccacaggagaagacagaaccttatttcattgggatcttttgctttgaagctgggatcaaaattgtggccctggggttcatcttccataagggctcttacctccgcaatggctggaatgtcatggacttcatcgtggtcctcagtgggtaagtccattttctctctctgtctgtgtgtgtgtatgaagggggttggtatcatgaggtggctgggggcagggaacctggggtggaaagacagcaatctgtagagtaggggcagaagaaaaagttcaaggctaagattccccagggtgctggaccataggtcagccacctcaagaggaggatgagtactgtgtggagatgcgtgtggtgttaggcagaggccatgggactctcagccaggtctggaagctgccacttctggttttccattctgtgcttggctcagtggctaaacacccacttctctggggagggtgacatttcccaatgagccttttcaccaaagcaagcagcttacccccgcctgggaggcacctccaagacgggccaaaagatgtagtcaaatgcagcttcttttgggcgttggagaagacctcagccatattttctgaactgatcattgagacttgtgttctgacaacagaagtttttatcatttgcagatttgttaatagtataaaatcgaatcatattaaaatgttggataaatcattctgtggaaattaatatagccatacgacattggggctgacccagtgtcacagcagcatatatgatggcagtacatttagttaaatatttgataaatcattcttttggaaatgaatatagtatgaggaagctgggttgacccagtgcccttggcagcaaatgtgttggccttgggaatggtgtgacgggcaggccttcctgggcttttgtggcttcctattggtctttgtgtcaggtggctcttggtacctgcaaagctgggcactgaggagtggtcctgtgtggatgtggcagcaagtgatgtggtctggaaattcccttacccaactgcttggcagacagggttcaaacccatgaagaaaagaagagagtgacttagaatggcagggaaggcgaaatattagctactactgtgattgaccaacaggaaaggagagaaaagaggaattgttttccagggaggagtcagaggaggggtgaaggtagataaagtcttagaaggaagggtaagggcttgggaatgattgcatctatttgttgtcatgtggaatagacaaaatactcttattttttaatctttacaccattgggattacatgaaagagaaaacactgaagatgtaatggactggaatatgtaaatggaagcacgtaagcagccagcccctcaatatgggaaatggataaatagactgggatgactattcatgtttaaaaatatctgttgccttacaaaaggattttctggaggttagttttctaaaagaaaattctactacattttaaatatgaattagtatatgaagatatagtttttacatagtattacagaactatattgggtaatgttgcaaatgtccctaaaataaataatatgtgctgtattagaagaggcctgtatgagaatctgaatcatttagaaatgttatgattctatctagaagaaaagtgttgtataagtcactacagaagaacaacaaaaaaagaaaagtattgtaatgtgtatataataagtttgtgtaaattcttggtcctgctcagctctatatgtggcagaatccatttgaaatttcttgtctagtccatttatttttgttttaaatgattatatgttcattaaagaaatatggaaaatacagaaaagtcaaaagaagaaaaaaaaattcactgattcagaaaaattcctgattgttttgtggtatttccttccaggccttcgatgctaagcaagctgtcttttaaatgcttgtaattttgctgctttcttcccaatatagtatgagcatattacatgttattgcatattttggtaaaaatctgtaatgactgatcagcagtttgttaagtagatgtacacatcttgcttctcatttttgcagttacttgacacttggattctttctgttttttggctctgataaataattattaaagatgctccaacgtacgtcttttggatatcacattttatgagacattttacaaggttgaagaagtacttctggaggagtatacggctgttctggtgtggggtctgggaactaatggctgagaggaggtagagaaactggtctgtttgactgcatgagagaagacttccagtagatgttaatctctctgcaaataagggttgctacatggttgttgaagaagcagattcatagggacccatagggttcttttgtcagcgaagccaagaagggcccctgggtccttgcctgcatgtccagggggtgttcaagagtcagtgcaggtgctgagcttggctgagtcagttgtcctctctgtgctctctttcccatccctcacatcttcccttcttagtggctcttcagatgtccctggctttgtgaattgccttcacaggcccctgatttccatatgaactcacaggactttgctcctgctcctcctccagacctgctgcttagccctcttctcagcatggaccgttccctttctcctcaattcatgggtgaatgtgctccaggcaaagagcttggtcctcttgagatccctgctgaggggctgagggttgcggttctatcccacaggaatgcatgatcatatttagtcttacagtcacatgatgctctcatctaccacattgtgtggctctaagatgcacgtttttcatgctggaacattgctgaaatcagcctgtgtcttacaataatggcatgatatagtttaattgacagcatgtttttctttcttagtgctacataaaattacggggcatcttacaattgttggggttgtagattcaatgacatgtgataccaaccagggaggcaggcaaagtggactttagagatgagtcatctggtactcaaagagggtaagttattcacccaagatcacacctgcctcttaatggcagatgcaggagtcagaattgtgccttttgatccagggctggtgttttgacccctgccctgtgcagcctccttaccaggccacctggtgtccccctttgtcttcctgacacctgcacccacagcagtccctgctgacagctcttccttcccacctcatctccaggtgtcacctcccattttcccctctgcacaggaggaatgacaggtgctggagcatgacacagtgcctcagggctgaggctgcacaacttctcagctctcggtgctgacaggagggaagtgggtgctgaggtgtcagtcagctggctcagtgtaagacctgctcttattgatctttgctgagagatgactagttgaggggcctgggctaccacattctgcctgtgacctctgacctcctaaactttagtgttctttggcctataagttgagggtgtgcatggtttagaaagcgcatttatgtacattgcttcatcttgtcctcataatgccatagaaaagaccttgctagcctcattttacagatgaagaaaccgaggatcagagagggcacatgaattgctagcaggcactagatccaggacttgagaccacatctcctggctccaagttccttctttcactgacttttccccatactggcagttacttcacaaccccaagggccccatggttctaaggctctgtggttgcaggttcctttagtccccgtgaggcagtgtgggatgagctcagggaggtatgatcaggcaaatgttcactctcaaaggtggggcttcacatgtgagttgaaggggacaggggcccaatgtgtccatcctgagacttctctctgtgggcttgggatgagactccctgctctgtggtaaagaaggcatgtcactttaactgtcagcatagcatggtttgatgtgtagagagtggatcagagttccagctgatttcttccttaaatggcttgtttgttcactcattcactcaccaattcattaattcagtgaaactagtattgtgttggtgaaggcagaaggcaatgctgggaccgagaaatgtggacgttattatattttcccacctgctaaaagacagtggaatttgccattcttttaacacattcttatcttacagaacttgggatctctcttgcattgggaacaactcaggcaatttttaaacacttgtcaggccacctggagaattccaaattagttgaagtcactattacacattagtcaagagtgagttataaaaatatagtacctggagcagatggacagatgagatgggaggatgagagtcaagggtactcctaaatcatgggtaacaacagggaaatgaaggcgaggactgtgtcttagatgcccactcatctctatatgcccagtgcctggcatatagttggtactcagtaaatgctgattgaattgaattgcttgcctatccccagattctcttgtctataggatacaaaaatgagtgctgggggaaggctggggctggggtaaagagggattgtctgttcccagccttcccccttggcctggctgagccaggcagtgtctatgtctctctcatctctatctacctctgccaggctgctcatattctggtcattctattaggaaaatgaaagctgggagctcaatttctaggccattaagcaatattgggcttccagtcacctgtggttatttaccaggttgtcagtgttatctcctgagaattgcttcctgggtgataagggcagagtcagcactgcatattgaagacctaacctcattgaagtggctgtggatggggtgggggttggaggggtggataaggagaaagcaggggtatcacatcacctagcgtttaccatataataaaaatggtcatttattgaaccatgtgccaaagaccacacacacacacacacacacacacacacacacacacacaatttctaatcctaaaaatgtaccaggagttgagaatcattaggcttgactattacccagtcccattttacagatgaagaagccaaggcacagacaatttaacttgtccaaatccaaatggttggtataaggtaaagtcagaatttgaacccaggccagtttgcctttagcacctgggcaccttccctaggccaagtgatgtcactgcctcagactcagcgacagcaccagctgttcctgtgctgctggagcaatttagtctcctttccctatttcccttgtgtctctttgggttcaggccaaatggagaaaagtgtgttatccctttccatctaggaagtctttgttttccattgtatgttaaagtattggtgacattacagagctagtcttgagtgttggtaatattgtctattttcctaagaaaacccccaaatcagctcaaaatatgctctttcctgagttttgtcagccttgcgtgggaggtgacctgcgttggctcttccctttactgcggagcacatggtgtagactctggggaggggcaggtgtgtctgtgcctggctcttcctccttcctctgccaaggtcatcaccccagggcctaggaggcccctcaagagctattgctgaatacccactgtgtgccaggtactgtgtttggtgtgggtggaatggggcctagtgtcttccatggtggtgggggctggagccacgcaacatgagaacgtgaaagggtgtccagcctggccctggggcactggggaaagcttcttgaaagaagtcacatttaaacaagtggaaaggatggacagatggaacttagctgggcagggaaggagaagagcccttctgggagaaagaatgctatgtacaaatgccctgtgggggtggcacatggagagaggcacacagacagaccacaggacacttctggaagcctggcaggtggcatggggagagacctgcagaggtcagcaggggccagtctaggccattctgagtagtctgtactttaaccagagggcagtggggagccacggaaggctttgagcagggggttcactatttcactgtttcactctgagtctgctctggatgtggcacaactcttttttcttttttaccctggaatcaactctgaggaaagccatggaaaaaagttggagccatctccacatccttagctgcagtttgggagaatgtgcagagccaagcagaaagaggggaggcagaggaaaagggagcaggggagaggagagccagggagtgctgcagtaaagctgggagctgccgtcctcatccccagcttctcgccagtggcacatgcagaacgatttagcctgaagcctgttggtaggaggatgctatctagagctaaatatatattgataggtatttttagagggttttctgtaaagaggctgccctaatacaagagtttcctgagcagctaaagatcgaggaaagcagagttttcctcagcactgtctctctgaggctgagaatgtgggggaagagttgtgaatgcagtcctcaggcccccagcccaatttgaatccctgtggtaatagtatgatatcagtgggtatttatatagcatcaccaggccagtgagcctggcgggacctcagagacctgtcttttacttgtccttactgttctgggcaggtgaaggatgcagatggggagcaagggcagaatgggtagagggaggagacatgagaacttgttatttaggagatggggaaaccgaggctgagtggagcaaggcaagggactcagagatacttagctgagctgctagatgaacagatatttatttagtgccttaatgctaggcactaaacctggcatcagcattattaatgctgatgttggggaggtctgcaagcctgtaagccttaccacttttcagttcttcctctcagcatcgttgctggctgctcctctgacagatctccacctcctccctggctttttgtgcatttctagctccacactggggagcacagctgccacttgcagcatctccttttatcagaacattatttctgttccaattgcatttccccccagatgggcaaatgatggaaaagataaggttagaatataggatttcgattccagggagaggtgggcaaaagacaaaatgtgaagcttaaaggtctcttcttagctctgtgctgctgataaatccagttacttcagggagactcctagtgagagtgccagttagtagttgatgggcagctgagttgggattgtgccttgggtgggagggaattttttctcatgtatgcactctgtcttttttctatattgagatgcaccattggttcactcaacagatatatattgaatatacactgtgttccagatgtaagacattggtgttgggatggtttctgtttcctgaaaggcttcttcttgccacccccacccattgacagaagctccatatggacagaactgagtggggcctgaattggctttgatatcaccaaagaggaggaaaagccagagggagtgaagaaagcttcgaaatccctgggtggtttggtttgggactttatttgtctcctggcattgcattcactcagggtgatacagggaaagaaattatggcaaggtgctttctaagtcagaccgttctcctgggcctggagctctcatttgaaggcagttaaactcgtgcattcttgtgcttgtgcatgagtgtatgtggaagagggaggtggggtgaaaatccccaggtatgttttcaaagcagaggtggatatggcataaatgcgaactctatagatttacaagaattgagaattaaaggaactgtttacatttccattctgtggttgaaatatgtctcctcctttgggtagagatttgtgcacttgtgtctatgttgtaaatgtagtccacagttaagtataaatgtgttggtgtgaaatgtgaaaatgcagcagcactatttaatgtatgtgtcactgaagtcaggaaatagcagatataatgagtgcagagtggttaccaaagggaaggggcaaggtggggcagagccgatgttgagaggaaaatgagggcatgctggtttaagaaagaacgtatgaagacaaggtaaggctaaggttactaaagctcaatcactgaattttagatctaggagaataataaatttgcctaactttcccttacttattatttttttcacagaagagaagactaaagtgcatgttgctaagtaacttgtccagggtcttttagatggggtgtggtgagctggggcttggatcctgtgtaattccaaatctaggactctgttgcagcgatgccttactacccctggcgatgagaatctgctgcttcttggttgtatttaggccatgaagctggaggtattaagaaataagattttctgttatttggctggaatatacatgtgcaacttacatggaaacagagtttaatctcatggactgaatgacctggcggctctgggttctggtcctgatcctgacatacattctctctgtcatactggtgatgatgtaacccatctcagcttggctttcctttatgaaacttcatttatgaagtgaaggtaaaacctgctgtagctacctccaccaggtttcatgacaagcaaataggatagtgatgatgttgataatgacagctcccatttaaccaggagctcatgtcttattttaaatgcagaaggcttcatattctatattggcacttgcacatattattttaaatatagaaatgtaaggcaatagtgatattatctccattttacagatgaggaaaccaaaacttaaagaggcaaagtcacttgctcaaggtcaaatagttactaaggggagagattggccctttaattctattatcaacaattctaaagcccttgctatatctagtgtacagcacagcctccactgccaaagtgttttgcaaaacaataaagcaaaataccaaatcagtgaacaataataccttccctccaggacagtgatattataaagataaatgttaaaatacacataaagcaccatgagtgccttgaaaaaaaccagcatataaaaattgaaagtactcaaaatactatggttctgtagacctcattaagaatggtcatttatctctataaaacttgcaaccacagaaacaaatttcactgaaacctattgcaaattttaaaactatggtaaatttaaaattttccattagttataattttgcctcaagagagaagtttactacatatcgcacataggatgtatcttatttcctatcagcagcatatctaattttatcaaaattagtcaaatcctgctacagtcattacccataagaacaacaaagaagttccaagagtaaaagttgaaacaaaggcctttattttaaatttttctaacaaggaaaatgttacattttctagatttccatttttttggtcttccctttctttgtcttctatcctccccacttctcacaaaacatacacaggccagaggggtcagcccctgtccgcccacatctggatgtgacccaggaaggctgacaatgccctctctcctccaggaagaatgtccaggcagagcccttgcacaaaggaggggctgaaaagaagcctgaggtctgacttcttccctcttgtctttcatttccttccttcttgactgccactcttctgtcagttgcctggaccttggtgacagaacatttaggaagggggatcagggccatggcttttctccctggcctccagcactggaacagtgactaggaggcagagtgacaagggtggctgcttcacatgtcagatgcattggaaacaatttacatcactgtgggggtccctgcatctcacctcctctccaccagccctctggggcccagctggccttggagagtccttacctagtccaggttggcatgactagccatgggagagctcaatctgaaatggaactgaaactgacctggtttggggtatctttgctgttgaatcttagtcaaaactctgggtgagggagagaaaaccagaaagaagcccactcagggctaagcatccctaatacccatatatgagctctgaactatggtgtgggggaaaatggacagagtcaggagaagacaggagggaaggaagtatagaggcagccggtattagttgagcacatcctgtgttcaaacattgtgctgactgctagggacgcagcactggatggagatatagcctctattcataccttgctgtccagcagagaagacagatatttactttaatttaatagtgtataacatgctgcataggagaagacttagggtgctaggataacttttcactgggaccctaacctaacttgagacctgaagactgagttatacttagctaggatgagacgagaagagggaaggggacaggatgaggagagttccaggcagagggtaggacagttgtgcagggctagaggtgggggaggccatggcaggtgtgagaaacaaaaagaaggctggaggggaccacagtgattgtaatctaagaggggttggaaagtaggcagggaccacatcattcacatcattcagggcctcgttggcatgtccaggcatgttcagtgggaggccattgaatggtttgaaacaggaaagtgaacagatttgcaggagaggcacgatgtttgcagagaagaagatagaacaagttgcccaaatgactccatgtctcctcagaattagggaaataggattaaagtcctcagtgtccctttcttccttcttgccccctccttccaacatcagccctcaactataattttgtttaacctattggagctgtaccaaaacccagtctacagaccttataatctagctgagcacatgttaaagatttgttaacctgcccagagtagagacatagtccctggccctctgagattatactctgagcatctcctactgattcaaataatgggtaagaattgatgagtgtgtgggcttttattttttatattcagcacagaaattattttaaaaatgctttgctgagaacattgctatatgattattatgatttttatttttctgatagaacaatggtcaaaagatcaagccaacccacatgcttgtttatgggatgtttctcttttccctgttcccaaagcccatgacacatcatgatgctgaatctggatcctaactgaactctggttaataaccactgtaaatataacattttgtgatttaggggcccttacatccttccagtggggagctcaaagtgctctgtgagttacattctacccactcatttggaagagggaaatagagaatcccagttccctttccaagtaagtgtcgtattctctgttctggagacaggtcacccagatggatccttcacatatggactctggtgatagagacgggaagggagtaaatgctcaccccggtcttttctcctgcccacttccatcccacatcccctcttcagatgagtgcagccagctctttaacgtgttagcttcttcctccctgctcttctgttgtccttttcttagtctccctaatccttccctgttttcattttacattctgttctgaaatacaagacttggggagtttgaggtagatgccacagagggtagtacgtggtgttgtggttgtggtgtgtatgagagactcattctgaccaagaccttcttagaactttgtctattagactctgacctccagtccttcttctccaataagcaaattcaagtttggggtgggatctccctactgggaatctgatcaggtcaaagtttgactagctagtactgcaaataaaggaggaggaacttccaatgatttccactccccccagctgtgactggtctgaactctaagcaacaagaagtcacctacaagcactggctgtttcctgaataaagtttccctcaaatatgtaacatagtatattttgtagtgtgtggatgctgttgtgatttataaaatataaatacatctaaaagtattgttgaatgagtagtattgttttcttttttaatttattcaatatagcatagtgattaagaatttgggcttcatagacaagcaaacctgaattcatatctttgctctactgttttctagtactgtggttgtgggcaagtgacccagcttctgttaagtctcaatgtctccatctgcatagaaaaaggaatggctctgggtaataacaattatttaaccatgttgttaaggggctatagtaattgaaataactcctccaagggatggggttggtcttgaatttgtgacattaaaaagagagcctcacacttgaaagaatgagaattgctagttcagtgtaactaacccattgatatgaaagaaggagatgaggcccagaactgcaatgtatgccccattttgcctgtggctaaagcctgattttagtcaagctggtcttcagtcttgtgtagaggtgatggggaaagtagaagtagaagttagatacaatgcttcactcgtgaacagaacagtctaattggagttcacgagatatatggcccgtgtttgatttttggtatttggtagtggaggtctgggagttgggagcaagcagctgtcatccttttgggaagccatgctgtccccagcaggtgacaccccaagtctctttgccagtgaggccccaccaccccacactagtatgagttaggttgctcatgcagagccatttctcaggcattattcctaactcttttccttttcataaagtgagagggcttatgctcatccctcaaccagactatgaaagagacactcacattcccaagtggtggttttatttttttatattttatgtttgtatgggaaattgtggataaagtgaaataattataaataaatggtatgtttccttttttaaaaaagagcaatctaattggaatagaatgtatgtgtggtcctaaggcagctgggaacaatgtgacccgtacagagcttgttccaggttggctggtccaggctataggagtctcatttttaaaatctaaaatacctctcttgcaagatttatgtactagattaagcagggctagatgctctaacaaataaccccccaaatttcaatgggttaacatagtaggttctctcttgctccttgaacaggccagtgtgtcctgaacagtgctcctggcttccctccacttggtgaggtagagacccaggctccttctatctggtagctctgctgtcctctatgatctcgtggtttatgtcccttcaagagaagtggaaagagagagtaagaataaggcatactccttaaatgtattggtatagaactgatacacattacttctagtcacatcccattgacaaggaacagccatgtggctcagcctagttgcaggtgagactgggagatctaatccctaattgggcagctgccttctagcaacaaccttgccctgtgggaaggagagcatcaattttggaggacagtaatgatctcttcattatctatgtgagtataaattgtcagatgcataggagatatataataaatgttttcttctaattattagtaacatccattgagtcaagaaatatttgctatgtgtgtacaaaacattttgctaagtattgaggctagaaagataaataataagatacctgcccccaaggaactttaagtctgatgtgtagatagtatatataggtagatgattttcatttgagcttgacaacatttgatcagaagaaaaaactgggaataaatgtgctctactctgtgcaatcagctttctatctgtccatctatcctcctttcattgaatgggtcccatgtgtaaggcctagcggtgagcagtaggagggacagcagtagagttaaatagggaagagatggaagatcactgggaatgtggtttcactttgccctaatgcagcagctgttgacacactacatgctggtgtaactagccattgaactgttgttgccacctctcttgatcaagctttgaagataagcatgagaaacaattagtgtatttcatattttttttatttttgttgtcatgcttatttttgtcctcttcaagatagcaaagcctaggggtagtcagccagctgaggctatttataaaatgtccatgttggcctggatatcactactggttaacatttgtcaaactctaaactctgtagtctagtaaaacagaggatcaggagccagtttcagagggaaaaccaacctttccatttactaatttcttttctatccttagcctgcacaaagaaggttgagaagtcagaattttagttatgaactgtgtacaactacaacaaatagagtcagtagtaaataaatggttgtcacgagtctttggagaaggatttattattgtggccatagattggagtggtccttgaggatgttaattatgttgctgcttgttgcagtttatgacatggcttctatgtggggtaattggatctaggggagctatccttttccatggaaaaaggccagtttggtctcaggtttatagccctaaggaaaggagtttcagaaagcagttgcccaaatttttcagcctccttgatatttccagtgcacaattctggaaaagggctccttaattcagaaattggcctttgttgcagggatgctaggtcaggaggcagggaggggaagaatggaaaggagagcagagattacctagttattcaggactgtggacctaattaatagctggtgttcagtgctaatcactgcattaaacatttcaaaggatttttaaaaaattcttggcaacatccctgtgaggtaggtactattataatcactactagatgaggaaaccagggcttaggtggttcagtaattcccccatatcatgctgctaatagttagttggtggggtcaggattccaatgaggaagcctgactccagagcttaggtttctgaccgtgatgctacactgccttcctaatttatgtatctagtggctgcatggtctgaatttttttttttttttttactcctgatgcatcttaattaacaaaagtgaaagggtgtatctgttggtctggatgtcaaaatccatccaagggaatataaaactcactacttggttttagttactggaaaaatggcttctattgaagggaattaagagaacaatagattattggtttttctatatcattttgatcttgaaatcaatttagaaatattgtccatttagcctgttaacaataggttagagttataacacaggacagcctggcaagatgcaaggaacaaaggctctggcatgacatagttctgtatttgaagtctgcttctggctttgtgacactgagcaagttatttaacctctcatcctcaatttccttactgggaaatgaaggatttagggtatttctgagtattttatgagactaaactggtatgatatatgttgagcatttgaaacagtgctctgcacatagtagattttcaacaatagtacctgctactattttatagtttattgatgaggaaagggaagcatataatgaacaaatatattctctgggttactctagcccccacaaaaaacttgccctagctgggatgaagttgttgtccttgtattttcaatctgttgctacttgtgctggattatgctagcttctagaacatactaaatcttgagttaatttcttagtccatttggacagctatatcaaaagtatcatagaccaggtggcttataaacaacagaaatttatttctcaacattctggagactgggaagtccatgatcaaagcagattcagtgcctggcaaaggcccctttcctggctgctggacagctgtctgtgtcctcacatggtagaaggggtgagggagctctctggtgtctcttttataaggacactaatcccatataagagcagagtcctcatgacctaataccttctaaaggctgaacctccaaatatcacattggggattaggtttcaacatatggattttggggatacacaaacattcagtctattacagtgggctttagagtcctggaatcacttcatctttgatctgtatttatagcttaatttatcttgatacaggtttcaaaatataattgaatagctacactcacttgataatattaaagtagggctatatctttaaggcacagtatcagctggctgtgaacaaaatgctggctgatatatatggtcttctttttctctctgtattcttttttgaattctcattccagttctggttttaaatgtaccttcagtaaatagatcctctttatttcccttctagttcattacttacttcccatgccttcctacttatataatcaaaatctcatgatagttctatgttgtttttgttgctttccaattacttatctgagtcttcctcttttgagagaatataacaccttaatatttattgtaataaatggtttgtttttattcttttcctttattttatttgctatttattagactttattactgtttcttcatttttcttcttacttctttctgtattgatcagcatcttttaaaccagttttttataattatctactggattatcaaactcttgtggtgaagaccattttttatctgtttcattttactccccatctttccacttctgatatggtttggttgtgtccctacccaaatctcaacttgttgtatctcccacaattcccacatgttgtgggaggggcccggggtggggggggcagtaattgaatcatgggggctggactttcccatgctattctcatgatagtgaataagtctcatgagatctgctgggtttatcaggggtttccacttttgcttcttcctcatttttctcttcctgctgccatgtaagaagtatgtttcacctcctgccattattctgaggcctccccagccaagtggaactggaagtctcattaaacctctttttgttcccagtttcaggtatgtttttatcagcagcatgaaaacaaactaatgcagtaaattggtaccaggagaggggtgttgctgaaaagatacctgaaaatgtggaagtgactttggaactggataacaggcagaggttggaacagtttggagggctcagaagaagaaaggaaaatgtgagaaagtttggaatctcttagagacttgttgaatggctttgacaaaaatgctgatagtgataggaacaataaggtccaggctgtggttgtctcaggtggagatgaggaacttgttgggaactggagcagaggtggctcttgttatgtttttgcaaagagactggtggcctattgcccctgccctagagatttgtggaactttgaacttgagagagatgatttagggtgtctggtggaggaaatttcttagcagcaaagcattcaaaaggtgagttgggtgctgttaaaagcattctattttaaaagggaaacagagcataaaagttcagaaaattggcaacctgacaatgcagtagagaagaaaaacccattttttgaggagaaattcatgctggctgcagaaatttgcataagtagcaaggagcctaatgttaatccccaagacgatggggaaaatatctccaggccatgtcagagaccttcatggcagcccctcccatcacaggcccagaggcccaggaggaaaaagtggttttgtgggctgggcccagggtccctgtgctgtatgcagtttagggacttggtgccctgtgtcccagctgttccagctgtggctgaaaggagccaatgtacagctcaggctgtggcttcagagggtggaagccccaagtcttggcagcttccacatggtgttgagtctgaggtgcacagaagtcaagaattgaggtttgggaacctccacctagatttcagaagttgtatggaaatgcctggattcccaggcagaagtttgctgcaggggcagggccctcatggagaacctctgctagggcagtgtggaagggaaatgtggggttggagcccccacatggagtccctacgggggcactgcctagtggaattttgagaagagggccactgtcctccagaccccagaatggtagatccattggcagcttgcactgtgcacctggaaaagccgcagacactcaacaccagcccatgaaagcagccaggaggaaggctgtacttcacaaagccacaggggtggggctgcccaagaccatgggaacctacctttggcattggcatgtcctggatgtgagatctggagtcaaaggagatcattttggagctttaaaatttgactgccccactggatttcggatttgcatgggccctgcaacacctttgttttggccaatttttcccatttggaatggctgtattcccccaatacctgtacctccattgtatctgggaagtaactagcttgattttgattttacaggctcataggtggaagggacttgccttgcctcagataagactttggactgtggacttttgggttaatgctgaaatgaactaagactttgggggactgttgggaaggcatcattagttttgaaatgtgaggacatgagatttggaggggccaggggtggaatgatatggtttggctgtgtccccacccaaatctcaacttcagttgtatctcccataattcccacatgttgtgggagggacccagggggaggtaactgaatcacgagggctagtctttgctgtggtattctcatgatagtgaataaatctcacaagatctgatgggtttatcggggtttccacttttgcttcttccttatttttctcttgccgccgccatgttaagaagtgcctttcacctcccatcatgattctgaggcctccccagccatgtggaactgtaagtctaattaaacctctttttgtttccagtttcaggtatgtctttatcagcagcatgaaaatgaactaatataacttttttgcaggcttataagcatccatatacatacagcactaaatttgatgctgagaatatagcagatttttaatacttatgtgtagctgacagtttgactgtgaaactcagttgattccagtgaaaaatggtgtgttgtagtggaaagcccacctagacccaaattagtagaatcctggtagtggtccttattggtggtatgactgcagcactagttgttttatcttcttgaatcttaatttaaaatgagatagcaatactagcttacagaaccatcgaagagactaaatggaatggcatatgtgaaaatgtctggtaactttattgttgctggtacctttacctgtctaccttcctcccatcccttctgctggccagtagcatgagtcatgaggggcaccatatgcagttatctatattcaggctatgggtgctgcagagaagagagcccattaaaatttgatggtgttcccaggagctgctgggctggagaggtaaaatggaagagaagagaaagaataagaaataagaatagtcagaaattttgcagcttttgaagaaggaaggcacaggcttatggtttatgatctgcttgtatgcatgcctgcctatgggttgtatttattcctgcctgagattacatcaaagtacatctacatctatatttcatattcatcctctataccatatattctcctaaggagaactcttgaatgtgaactgtgtggcagtggtgtttcctttgcagcttgcttgctttatgaatgattttgttgaaagaatttaaaagccttttccttcctttggagaaaccataacttatttggataaattgctccagaatgggattcccctgtcttttctgtttgtatcttttctgccttttaccaatccatgccatgatgttctgttgtgtgggaaccagtctaagacctggcttcctagggggatagcccccttcctctgtgcccacttagcacttatctgcattttccctccatcagcaggcatttgtgtcccctctgtgttattctcgtggccctcttgtttcttcactgagattgagggcgggggtcatgttctcctttccctgttctctagggtgacttgtgtatatattcttagacccacaatagatgcccaacaaatgcaagatgagtgagaggtgaaaagcagggttctgtgcaaacctgtccatggagctgggcagggcgggaggtatggaaatcatgagcccagcttacgccttatcgtccatgttcactcatactttgcccagggtgtgtttactgctcctgagcccaggtagcaggtgtaaaaatctaagctataaccaaaccttaggcccaggagcagtaagagtgtgggttctaagctcatagtccagctgtgggactgaggctgaaggtagaaaaattgccaggcatggtggctcacgcctgcaatcccagcactttgggaggccaaggcgggtccatcacctgaggtcaggagtttgagaccagcctggccaacatggtgaaaccccgtctctaccaaaaatacaaaaaattaccccggtgtgatggcacgtacctgtaatcccagctactcaggaggctgaggcagtagaatcacttgaacctgtgagacagaggttgcagtgagccgccattgcaccgttgcactccagcctgggcaacagagtgaaacttcatctcaaaaaaaagaaaagaaaagaaaagaaaactgggtgacatggagtggggtcctttgatcaggactctgaggaggctggtgtgtttctcccttcctgtttcagaggcagcccacatcatttagccaattaagttggaggactctattttctgtttgagtgtttgttgttttttgtttaaaataaatgatgtgttaatacagtcagttgtttgcatgacacagatttcttttcaatcagtctcttttcccctctccccactcttcctggacaattagcaaagtgtttggtctttggtttggatgaataattgattcagaagctttgtgaatgattcatggcccatatgctggggcagcatgatgtggtgtatgggtgtgtggcagcagcacctcattacaaaggtcaagcttctcccaagcttggtgcaggggctgtgcaggccacctccaggggcagagcacgttgcacctgatctttctctcatgttctctcaaagagagagtgttggagcttcttccagaaaagcaaggttctctatgggtgtatgacttccagaccagtgattctggtttgggttggatttgtcagtgaactgaagctttcccctttaagccaacacttcactctccccaagctgaatagctgatttgattttcaaagcatttgaggaaaggagatctcttgcctgtcttcctttacattacagtacttcaaaccttcccaagcaggggatacttttttctttggatcttctcctaaacactccctgctactacgctaattttatttccttgtctatctcctttactggagatggagaacacctggttaccattcgctttataggtctcccttgtctttgaagactattattacatacttgcttgcatgaggcaatgggactgttgcctagcttgtggaagagtggcattccctatctacaaaacctctcagtatttgagacttcttaatgtgtcctggtctttagaagctgagttaggaaaaataagttggttacattaagtcctgaaccaagttttttgtctcttaggcagtcagatcccacatttttaaatagggaatcgagacagagacaggatatgaataaaatccaagactctgatgaagatgtggcagtttggtgattgatcatttggggtttttttagtaagatcataaaaatattgcataaaaatttattttctagcataagttatgattatcatgtttaggtccctaatccatatggtgtttctttgcatctagtatgtgaggtatgactatacctatatgtttttccgtcacttcccaactccactgagtgaatactaacagtacaacttttgcccactgatttgtaatgtcacttctgtttgtataccaaattcccatatatatgtggtctgtttttaggctgtcttttctatcccattggcaatgattaatgactatatttttataaaactttttgataactgatagtgccaatcttcccctccatttgtctttaaaactggctaatcttagccattataatttcatatgaattagaactaacttgtcaaaatcttcaggttttgtttggaaatgcagtggatttattgactacttttggggaaaattaacattttcacaatgttgaatcttaccaatatttctccacttatttgggatatattttataccctattatagttttggagattttttccacttatgacttgcgcatctttgttataatttttcttctgtatcttgtaattttattactcttgtgaatgatttaatttttttatttctaatagaatgttgctaatgtataggaatgttagtttttattcgttgatgttatatccagcaatcgtgtaaaagtttgttagttaaaatcatgttggtagatttttttttagattatataggtagaaaactgtattaactacaaacaagtgttattgtatttgtttctttctaattcacctagtatatgtttctttttcttatcttattgccctaaacaggacttccaggaaaatgttgggtaatgacagtaatagaaggctgtcttattttgttccttatttaaagtttaacaatgaagacagatgttccttataatgttatggtgaatactctttataaaggaagtaaagaatgattgttaaactaatgtcaataatagctcaatattttcatctaattcataaactcaaaggttttggaagttcattctgtagaagattaaacattgacattattgtgggtgctattgaaaactgagttaaaagtttagtactagcaataagcttatttttggagtgataatatacatacaattttgatgaaacatgatgttattgtataaacaaagtttttactaaattaagaaacctatggaacagaaacatataggatgaattgtatggacaaagaattcattatcacagccacacaaagtatggtattccgcattttgaaataaagactatgtattgggtacagtatacactgcttgggtgacggctacactaaaatctcagaaatccccactaaagaatttatccatgtaaccaaaactacctgtacccccaaaactattgaaataaaaataaaaaataagaaaagaagtagtaggcaaatagaatgagtaaaaaagaaaaagtaacaagaaaatttagcaagttcatcaaaaagcaagaaagcagagaaaggaagcgattttaaagtgaggcaagcagaatgtgtgaaagtagaagtaagtcctgacttaatagcaattgaaacaaatgtaacagattaaacttattttttaaaagtcagaggccctgtgactttatttaattttttgatcttatgtttaaatgactaagctaagtaaaatgacactagaaaattgaaaatagaggaggtggcaaaaggtgttctagacaaatgccaaccaaaagtaagtgaacataacattaaaaaaattcaaggtgaaaatatcaaaggaaacaatagtgactatttcactgtgataaaaagaaaataattgaaggacatttaaaacttatgcaccgtcagaataaatgtctgttaaaaacgtaaaggtaactattaggtaaggagatttccaactggttttgaacaaaatgcaacaaaaatttaggggtcttcataaaaaagttcagtatcattttgggcacttaggttgatttacaaagcaggtcctcagaggcttaaacatttataaaatgtttcccctcccccatttgtctttaaaattggctaatcttaggcattagaggtcctgaactaagttttgaacaaggtaatgggcagcaaagagaaaaaatgtatgctgcaattctgactttataaaaattcaccaccaacatcatcacaaaacttttgtagttcagttactctgtgtatttgaaatttttgataaaactataatgtgtgtatataaatatatttttatgtatatatgtataaatgtaaattacatttctgccatatatacacacacatacatacatatgtaatacacccatacccatgcacatatagatgattacctttaaatttttaaccactctattgttgtcttttatcctttgtggctgatagtgcttccaatatcaacatgattatttctttttttttttttttcgagacagattctctctctgttgcccaggctggagtgcaacagtgcaatctcagttcactgcaacctctgcctcccgggttccagcgattttcctgcctcagcctcccaagtagctgggattacaggcatgcactatcaccccggctaatttttgtatttttagtagagatggggtttcaccatgttggccaggctggtcttaaactcctgacctcaggtggtccaccgaccttggcctcccaaagtgctgggattacaggcatgagccaccatgcctggccaacatgattatttctttacagataacttttgtttcctctttcattggaagcattagcattttttccttacttttggtgctgtaaaatttcactaatatgtgtcttatatgatggtttctatttatttttatttttatggcattttaagatttctatttttattcaatgctgggaagtacttttgaattgattcttttactttcaaattctctgcttctccacttcttaattttgcttctctccattttatctattctttatttgtagcacttgttttaaatgatgttggaatttcttccctctatttttaatcttttctttatatttttcatctttttcttactcttgtgttgatttctgggaacactgctcagttcagtttttcacatctcaaattcacctgtctattttgccactcaatctacttaatcattttaaaagttttcagttatcgaaatgttcaattgcaccatctctaggtaattttgtaaaatgcttgcaatattctcacacttttctctaagctgataattatatgtcttcattctcattgagtataagttctttgattgttgagtttgttctctctctctccgtggtattgaaattcctcaagtttttggtgattcttgattgtaatattatcttctttctaccatgtctgtttgtgcaaacttcttggaaggagaatacctatgaagctaatagtctggcaagggtatagaagtggtgagacctgctgctggatgggtcactttgatgaccagtcccctgggagagagcacttcctgttcctctcaggcatggaaaggcatgagagcactttcccatctttctcacccaactttcatgcccattgcccctgcttgtgggcagattttcctttttgctgcctggtctgagggataaggtgggttaaggaggagggttaaagtgagtgcttgatcttcctgctactgtattcaaaccatcaccctgttggtcacctggatcccatcagatcccagtggccaccctctgtaggtgggagcacttgtggtgacatgcctacatttagagtggtcatattctcttctgagggctgggggccgtggtttctttttcttttctttttttttttttttttttttgagatggagttttgctcttgttgcccaggctggagtgcagtggcacgatctcggctcactgcaccctccacctccaagattcaagtgattctcctgcctcagcttcccaagtaactgggattacaggcatgaaccaccacacctggctaattttgtgtttttagtagagacagggtttcaccttgttggccaggctggtcttgaactcctaacctcaggcgatccacccaccttggcctcccaaagtgctgggattacaggtgtgagccaccacacctggcctgtggtttctttttaaaaatcagattgtagctactttctgtccagaggggattcatcacaacatctagcctagtgagggtttgtttctcttttttctgtccagtgtggttactgtatgtatatagaaaatgatttctaggaatttggtggaaggggggagaggtcacagtgtgtgttcagtctacctgtctgagagagaagttgaggcaatattttcttctaacctctctgagtctcagttacttcacattcaaaatgaggtggtgatgatgatgaagcatgagggtggtagtggtgattctcagttaatatttgaaattggagtgtatgtcaggcactgttctaagtactttacctgtgcaaacacatctaatgcctcaacaaccctatgatgtctattctattactattgccattttatagatgaagaaacagaggtacagtgagattaaataatttacccagataaggggctacctactatgtaggattagtttgagaattattaagctaacacatgtaaagcacttagcatagtacctgaaatatattggaacaacaaaaatggcactaataaatatatactgagtgaatgaaaagtcaccaaatatttatattccatgcagtttgcagaagatcttgtagaagttagttggacagggtgccctgttctagtgttttctgtcttagtgtttttatgtaatataaaagctgtgtgtttctggccatttgattcttaccctaccagctcaatatttaaaatttttacatattgagttattggtgcttgaaaccattttaaatctttctgctttctcatatgatatgattgcaaataaattaggtaatgagttttaaaaaatcagttgtggttaatctttcaggttcagagaactgaaaaatatatctgctttaagggaacttacattctaatttccatacacatatatattacatgcatttttatacatgctgcatgagaaagatgtcctttatatggtggttctgtattgaataccagcatccagcacattgtctggcacagagcaggtgttcaataaagtactgctgattcaatggaatctttttcatgtgttatacgtaaatgtgcatgtatatgtaaattggaatgcaaatctgtgccttcctgggacccatagtctagtggaagagagtgacaagaagcaattgcaatacatcaccgcactaatgctctgttgaatgtattctgggagtatggaagaaggagaaggtgactgtgtttgggaaaaaaaaatcacagagaggtgatatttatttaagctggatgttgaaggtgggtaggagattgccaaggagaacatgggaaagggcattcagtcagggaaagtggaggaaagcaaactgactagcaaagtcctgagaatctacaaagtgaaaatctgttcagtgatatagtgttaatctgaaaaggcttctgttgaattttgaaaaagatcatgcagaagatgataagcatggtttcacaaaatgtaatataattctgcaattctttgcctaaaggctttcagtggtttgctgttttctgcagcagaatacaagatccctcctgacctgaccacatgcagcctgccctccagctatactggactacttgtggttccttgaattgtgtgctatttcatgcctccttccttttgaatgtgctcttttgcatgctgtaacaccaaccctgccatccctctggctggtatctattcagctaagtgactattccctgactgtgcttcctccccatttccttctattttccgttactcgttgactaggctcaccctaaacttcactcacccagttgacattagtatctcctccactacatagcttctcaccaagggcttgaaggcaggggttgtattgtattctatttgaactccttgtgtgcctggcacttagtagtcattcagcaaatattaccaaatgaacagataatgactgaacaagctaattaatgaattaatgaatgaatgaatggcagatatgaaagggggaagaattcaggaagacaggcaaaatatttcaaggatacctttaaggccaaatgaagaaatggaaggttgatccagccaatccttgtcacatgatcaccttcatgggaggaagaatatattattcccggtctgcttaccccttctctaatggtccttttaccactactaatgctctgtatgagcctctcaatccaggtgtcccgcaaggtctgagtcccactgaagcttttcttaagttgagtaaaagtaacctgaaaaaactgataagcatttttcttagtagaaatccttcctctgagcagtaacctctgaatattatgtataaaaccattacattacttaatggataagactcatgttaaaattcaccttgtctccacagaagatagacccagagtttagtctttgcttttagtggccacatgtaaaagtggtgtacagtggagctgtattacttattataggtcttgtgttaaaataggacaaaggtaaaattagaaaccaggatgccagatttcaggtccccagtcttacaacaaataaacatgcttcctatttaggtcctctttggtctctctcctccttatcatcaccatcagcagatgctcaatgaacacctcctatttgggtgtgacatcctgttgtgtgcttgtgatgcacagttagacccttcagattgtttataataagggagatggagaaccttcacaaaatcccccgatgtaaacgcatttcctagatcccttgtggaatttattgtaattctatacatgcacacaataaacatcagagggcttcgagtaggtgcctcatcatcaggaatgccctgtatcctcatctcccaaaccgtggcacagggctgattcccctgtgtttactaccctaatctctgtgctctatggcaacatggtgttttatatggcttttatatggtagtgtgtactccttgtgtgcctggcacttagtagttattcagcaatatttgataaatattgaacaaattaacaaatgaatgacacatatgaaagtgagagaattaggaaggcagatgatggggtttagaatatgctccccaaaatatgtcaccttggcgtactcaatgttttaagctaaaggaatttgaaaaacaacgtgtgcaggaaagactctctggtcttcccctgaaagagctcatagaacgctcatgtgagaggtgccctcccatccctggaggaaaggagcatcgtgatccctgaagacagagggacactgacagggatatgaacaaatggacctcgcaaagtctcccctagtttactgtacttagcccacaccattttgtcttattgtatttttccataattttccactcttcatcaaacctggtattaaaacagtcaggtataatcatttcttggagtcctcatttccttataaaggctcctgtgtcttataaaagttatacaggttaagcatccctaatccaaaaatccaaaatcaggaaatgctccaaaatctgtaacttcttgtaacgtggtattcaaatgctcattggagcatttcagattttggagttttggattagagatgctcaactggtgagtataacatgaatattcccaaatcaaagaaatccaaaacacctctgctcccatgcattttggataaaggatatttaacctgaattaaataaatctgtatgtttttcttttgttaatttgtcttttgttatagaaccacagctgagaacctggaagggtaaaaggaaaaggttttttcctccactacgcgggcaaaatattgcaaggatgttcttaaggtcctaaaaaatcttaagatttaacaggtttttaggcagaaatgttgtactttccatttagaaagaagttgaagctttatatccaacattatatatgtttaacataataacagttaaagatacacttaaaaaaagatggagagaattttcaaggaataggatttcaggagctagaggtactaggagttatgaatctccccattagataggtagacaatgaaaaaaaaaagggggaaggggatgatttgcagtttgatggtaacaggatcgttgagagcagcaaaacagaagtaaattgatgctcatctcccagattagttgagaacggcctaattagctaatgaacagttccagtcctatgttctgaaaggctctgtttctgggcaagccgcagtgcttagcagcagctgctaaaccatgtggacatgctaacaccaagcagaggagcacatgttatgttttgacctgcaaagactcgtctttttgagtcacacattcttcaaggagtattagagatcttgtttcttcgtataatagagaagtagcagtctcagtggcatgaactctggagccagactgcctgggttcaaatctcagctttgtcacttactaacacagtgatcactgctgcttggtctctatgtcctcatgtaggcccttgctccccaccattgtatcaggtttggtctgggtgaccaagagaacacggcagaagtgagggtgtggcttttgaggctaggtcctagcagacattgccatatcttccttgctctcttggatcacttgcttggtggggaagcaggttaccatatcatgaggacactcaaggagccctatggaaagtcacatgatcaggaactggagactcctgccaaagccatgagtaagccgtcctggaaacccagattagtcaagtgttcagataactgcaaaccccagctgacagcttgactccaactgtggttggtttcttgactgcaacctcatgagagatcttgagcaaaagatccccacaaaaacactctcagattccccacattgctaattactgttttaagccacgaagcttgcttttcagaagtgttaatagataattaaagcaaaaaactttgtaaagaactagtttaaaggatgttcttaacaacagacttgacttgatgaagaaatagtggctgatattgtttggctttgtgtctccacccaaatctcatcttgaattgtaatctccacagtccccacatgtcaagggggagatcaggtggaggtaattgaatcatgggggtggtttaccccatgctgttctcatgatagtgagtgagttctcacgagatctgatggttttataaggggctcttccccattggctcagcacttctccttcctgctgccttgtgaagaaagtgtcttacttcccctttgccatgattctaagtttcctgaggcctccccagccacgctgaactgtgagtcagttaaaactctttcccttataaattacccagtcccgagcagttctttatagcagtatgaaatcggactaatacagtggcatgccttttaatttcttgatttatggaatacctttaaagtaatgttacctaaagtaacttttgtggaacagtagtcctgcaagatgctccatatataaggggtttgatgtgtttattagtttgggaaatgctgcatactagatctccttcttggaaatacacgttgctcataagcatattaaagaatataaacaagtcttaaggattttttgtttgtttgcgtagtccattgtttcctaaactcatataaccaaggaatttttaaagtcaaatgtcacatattaaaatattagagaatactctgtaagaaatgttgtcttataacactgattctcagacttatgcctacatcagaatcgtctggaaagcttaaaacgagattgttgggccccactccctgtgtttctaattcagataacctggggtagggcttgaaaatttgcatttctaataagatccctgctgatgctgatgctgctgatgggtgcgtgtgtcgggaggggaccacactttgggaaccactgttcactagggtttcagtttcctgagtaagagcttaaagaatgaacatgcaaatggccaataagcacaggaactgatgttcatctgctatggactgaatgttcctgtccacaaattcatatgttgaaaccccagtccccaatgtaatgatatttggaggtagggtttgggggagctaattagttcataagggtacagcctttatgatgggaatagtgctttcagaacagccgtaagagagcttgcttcatctctctctgtcatgtgagaacacagtaagaagatggttctctgcagactgagaagagggtcctcgccaggaatctaactggccagcaccttgatcttggacatcccagcctccaaaactttgagaaataaatttctgttgttgaggccacccagtgtatggtattttttaaagcagctggaactgagcaaggcaacatcattagccattagggaaatgcaaataaaaaccacgataagataccacctcacacccattagggtggttacaataaaagagacagacaataacaaatattgagcaggaatatggagaaatttggatcctcacacattgctgttgagaatgtgaaatggcacagcctcttttaagctccttaaaatgttaaacatggaccatatgacccagctatttcacctctagaaattttaagaggcataacatatacccatacaaaaagttgtgcattaatgtccatagcagcatcattcacaatagacaaaaagtatcccaagtgtacatcagctgatgaatgggtagacaaaatgtggcatgtcagacaatggaatactactcgacaatgaaaagcaacaaagtactgatacttgctataatgtgggtggacctggaaaacataaagaagttcctcacaacaggctacatattttatgactccatttatattaaaaagttcagaatgagcaaatccataaagggcgtacgatagttgttacgaaaggctggtagaagtgaggtggggagttgactggtaatgggtttggagtttttttggagcgttgaaaatgtcctaaaattagatagtggtgatggttgcacaatcctgaatatactaaaaaaaaaaaccccactgaattgtacgctttagaagggtaaattatgtggttgtaaattataactcaataaagctgctataaaaatgcatatagcttctaaattaggatggcaacaaaagtacaaatatccaattgcagtatacgttttaactttattgtaacctataaggtgccagaggcatactacaaatggtggcagtggtgggttggtgcaagctgaaaatttagatgtagctggcgttttagcacccttctccccctccttcattcccgtgcagataataaatgtttattgttgttctattgtggccccaagtgagctgtggacatggtggggaagcagcaggctgaccccggagggtttgctaatcagagagagtgtaaaacctgtttcagaatctgtcatttacatggggcagcaaatgacagatagcaatttaaagggtcacctttcccagggtatggctgtttgttttggtcattgtggttggttgttttgcattttaagaatgtttggagccttaagctagcacagtggctctccaaacttcagcgtgcatcaaaatcttctgaggttcttgtttaaaatgaaaaatttggccctacccccagagggtaaggaatctgcctgtttagcaagcactcagatcattctgatgcaggtggctcatggaccacggtaaaaacatttcagctccaaaaaaaaaagtcttgctatgttgggggtgtacataaataagcatggggctgatctaaccaaccccaggacagtagttactcccagaaggaggggatgaaaacaggttgggtggagccttgcctgtgtctgaaatgtctaggttttttaaaacatgatttgaaagaaataacagaaaatattaacccctgttacatataataccatgtttgttgtatcttttgccttattttttgactatttgaaatgcagtatctcaaagtattttgtcatacttggcattttagatgttcgtccattccagggactcagtgcactgaggcagggaagacagtggtccagttggtgggctccctgtgtcctgcagggctgtggggggatggcagtgctcccagcttggaatccccccacactgaggtgggagatttcctcctcccacgtgagggtgtggtcttgactactcctggctccacacaggctgtcccttagggcagggggcaggagctcaagaagctggaggacagaatttctcccctgagaacaggaaagagaggaggcacgaggaaaccacagtctgtctgctttaccctgatggacttctgttcagggagtttgggtgaattccacatttggatcacaatagttgtcgcctgcctttcttttccctcatagctttcaagacccctttcatgtccctctgtctccaggaaagatgatttatttttttcttggcccaaggctcccccaggggccccaagtccaaacactttctttgctgttccttcaggagtgttctttctgtgatcccattatattgaaatatatgcagatggagcatcacgtgtgcctctagggggttggggaggagcctaaggaacctagagagccatcctgagatgtggggagagggttggggtgctgcaggagagcgggatgactggcctgtgttgacagacacgccgtggggaagcagaagctgccccgacagtcttgtaaatggagtgttcacctctagcagatgtaaggcatggtttggaaggggatgtgtgccaggtcgtcaagtttcacagcagtctcaggccagttgggaagcctggcagcgtgtgccatccctgagcaagagggaggctggaagagaggactgtggtctgaaagttaggagccctgggctcttgctagcttcttccttcttcgaacctctgccctgctgtgtgagagcaggtagtgcccttcctctgccttatggagtgatgagaaggaattagggcacttggaagatgctgatttctaatcctttagttgccaccaggcctcagcccccttgactttcttcctcaccccctcaattttcctgctgcccttgagctcttcataaaagtccctgctggggccctgccttctgttttctatctcaaattgtcccctttcccttcccagacctgttgtcctctatgttgaaagtttctaaagttatgtgagggactgtttggggctagggtggaagggggctcttagtagacaccaccactcacccattctgtgccaagcttggggccagctgctgcggtgataaacacaccctcttctctacacaaaaaagccgtgcagacagtgcacattcatcagctcctgttctgcctcttcatgacaactgtccacctctcaggacatgatgtgctctgaatatcagtgtcgggccatttcaaacccaggggatttggtgtctggtgttagcctggggtaagaagtagtgacccaggcactgggctcacccctttcctgcattctttatgcctgacagtttctcaagtcgtgcctgtccttttaaatcaagcgatctgttcttccctttgatgtcgtcctcctggccaccagcctacatcctcattacctgataacttagatgatttaaagcctcactggttggcttcttgccgtcattttctccccagcttcagtctgttaacggccatgaaaatctcactaaagcccttctacagcaaggcacatgcctaaatgggaacccaaaacatctccctctttcccattgccccctctgccctgttctctgtggcttttgaagccttcctcagcactgatgccacctgaactccagcagtgctcatgcctgcccccgactctggccaccgatgccaccttaactccagcagtgctgatgcttgcccctgactctggccaccgatgccaccctaactccagtggtgctcatgcctgtcgctttggatttctcacccctgttcatgatctgccctcctctggaatcctctatcctctcctctttcctgtgcatctttcaaagcctttcacgatgacacgggctggtgcatttgcattcagatcctctgttcactagaaatggaagggaccttggaggtccttgagtccagcttctttccagagtccccgcaaggggcagtaacttgccactgactacacactaggttattccaggaccagacctctcactcctagtccagcgctccttccaccacaccatgctgcccaaagatgtagaggaagcattctcgcccacagctgactgggatgttgtcatcaacagcggcggagatgcagtgggagtaaataacaatgtttgtggaggccttcttattcattgcatttgcgatgcaattagcactttattatagcttgttctcattcttattgtcagttccacacattgagccctttattttatcagaatataacactgcctcgtttgctaattacctcatacatagaagtaaaaactgtcttaaatatcttttgtagcccacagcatctcctgaagttctaggcatagaggagaacttactatctacttgttaattcactgggtttcaaggacaattccaggcaaggctcacatttgagccattagttgtgatgaagacctgtccactaacagcattgtcagctttgccttaattttctatctgaggcttcttagagcctcctggttagaggtaggtatactttcccctctgttcccataacactttttttttcttttttttctttttttttttttgagtcagggtctcattctgtcacccaggctggagtgcagtggtgcgatctcagctcaccgcaacctctgcctcccgggctcaagcgattctcctgcctcaacctcttgagtagctgggattacaggtgcgtgccactaccacccagctaatttttgtgtttttagtagatacggggtttcaccaggttggctaggctagtcttgaactcctgacctcaaatgatccacctgcgttggcctcccaaagtgctgggattacagatgtgagccaccgtgcccagcctccataacactttattagtatctttattgttgctcatgtcatatggataattatgaacagactcctgcctcctcctatgtttctggggacaataagaagtctttctttgtatggcccgtaggctgctttgtccacacaatgtcttgcacatggttgtgctcatacatggttgttgaattgaatattatgaataatgacagagttaacagtagcttaccctcatgtggtttatctacacagcccagggctttcttccacagtgtggccaaaccccagactgggactaaggccaggctaggagggtttgggatggtttccagatgggcaaagatagttttgtgtctcagaatgtgtctctaaccacatctcaaaaccaaatatgataaatgactttcgtcttatccatcatgtttagttggctaagcctcttcctctatcagcccagataatgaagagatgggatttttattgttttctctgtggcacagagaataaagcaagttcccaggtaacaaggcacagcagcatctttcaagccccgaaactgagatggtctgagaagagcaggcacgtctaggagaaacagaaaggaaaagccagccggaaaggggaatcattcttaatcgatcccaagcctctgagagctggaaggtctgactgcattttacaaataaaaaagtcaaagccccataaaggaaagtagcctaaagccacagggatggtgaaggagtggcgtcaggatgggcagaaagagctctggactcttgggctgctgctacaaccacctggtgtgggttttcttaacaccacagctccatcaggttcttaggaaaaatgtcacacaaccaggttgtcaaaagggctttgagggcattaagaaagggacagaagtggatggattagaatggacaggtagggtaccaaggggccagagtgagaatgaggaagaagggctgaagagagagggatcagtcgtatttgcttctgtttctgaatagtttccctttttggaaagagaagtaagagaatagaaggctaaaatcatgccacagactggcaggggtggttgggtgtagacacaacagctcaccttcaggctgctttcacattcattcatctctttcccttataatgatgatgctgcctccagtttttagaactttctggaaacttctgagaagtgactgtctaaagggggatgatgggagaaggggagttgtccatgggttcccatcgtgcttgctggagcaatgggtgttggcagatttcttcagaaggagtttgtcagcagtggggtggggctgggaagaaagccacagtgaggcaacaggtgcaggcatggagaccagagcaagcacagtgtccgtggagaacggcatgcatgtcacggcaaccactggagtgagcgtggagtggagcatggcggagagtgggggtgaacaggcaggcaggagctctaggtctgtgtactgcggtgacacttctggattctactgtgaagacaatagagggccattaagaggcttaaagtgagggggtggtagaatcctggctacatagacctcccagcactcagagccttggaatcttgccatggtggtacatgtgtgtgttgggggtaattagggaggaaggggtgaggctgagctaggatgactagttaggacaccatctttactgtctagaatatactgagggctgtgacctgggctgtgtcagtgggaccagaggaggggacagatacaaaaaatacttaggggtctttaaacttgggggatgagagggaagaatccaagatgaatcccaagtgtaggggagggtggcttttttcaccctggatgaggagcagtctggtatggagaggggatgagggtggctctggctttggcggttgggtgtgtcttttggactgggtgtggtgccctatagaaaggctggagcttgggacaggtctgtgtggacacctcgattcatcactgcatggttggtagttgaaaccatagacatgggtcagattgtcccagtgaaatggcagagaagagggcaaggacagactccaagaggccctgaatcaaatgggtatggaaaatatggagggcctgggatggaggctgagagggagctggcaggaggggtgggggcagattggttgagaccattagcagggaaatgagggagaaagagtttccagaagggaatggttaccaggttcaaatgtgagggaggaattcactgctggcatttgtttgagaagccctgacctttttctgttcccttgctagaaataaatgctttttttttttggtagcagacagtaatgtactggaatggaatcatgattgttccgtgtctcagaatccatatgtaaagtcccttgtcagatagcagggaaacagtcatctttgggcagtttgtactgagagggaggggaggccgagtgtaaaggatcggtgccttaattttagcaaggctctgagccccttggaaggcaagctttatttctacatagattgaaagtattattattattacatccttacgctgtatcagcgccaaacactggagtcctcaatactgtatttatttctctgggcttttggaggggtggggaagaaacgggacatttaggttgctaagtgattgtgcttgcttctaaaaataatgagattccccagtggctcgttctcctgtgttttgcttagagttagaggatgccaaggtcaagttatagatgacaggctgtgtctccaggtggtgtcagggcatcctgttggggaaggacaaggtaaactctccctctctggtcctcccacctgcatccccttagggcccactactttgggaaattgcaggaaaaactgggcctccccctgcttggattgaagagcctcgcctaggcagtcagcctcagtggttgccatggtgatggtgggtggttggtggggtggtgatgcagcgtttggcctgtgcagctgaggtcctcaatgcaggctgcttggagcccaggctgctgaagcttttgacagtttgtttaggattccagagggtcacttgctgcggtgttgaaatcttcagacagacccgccagctcagccagctgaaaccttcattgttgaatatgcatctcacaggccaaattttggcaggcgctcatgggattaggagctccacagcaaccttggtgggggaaggggtgtgcgaaaaagctctgtgcaggggagagtggctgggataatagactctgaggacaacagaaggccagaggcccttcagatcgtccagttcatcaacaccttcaacaacatccctgacagctggtcaccaagcttctgcttggactctccttgtgatggggagctcactaccgggcaaggcacaccactccattgttgaataggttttacattttctcctctctccctcacttctttcgttcctccctcattctctccatctttccttcccccctcctttccttgcatcctttcatttttttggcaaaattctggccccttctaatttgattcactgactcaagttatgccaagaaggaaagcagtgtaagctttcatcaaagtgacaaccacttgccacccaacaaaacattcatacttttctcagctacttctgacattatttcaagaccccttgttatttccccatcccctatatttctccatattgctcttaaaatataacacccagaatgaaccacagtactcgactggtctgaccaatgcagaggactttagggtgacacccatgtttgtgaacagtctgagatgattttgtagccccctcctcacacccttggctgatacgaaggctgtgattctctgtcgttcccagatcttttacatatgagcagctgatgctgggctctacatttgtacttttttgattttgtcatctaagctgttgagaaacacgttgaaatggacagaaatgatgatggaatgccgtggcaaaactctagaggcctccctgcaggtggaaattataatagtattcatagctttttttttctgtttttatatccaactatctacttgtctaaccaattaatcactgatctttttttttttccttagagtgttccattccattgtatggatgtgctacagtttgtttatttattcagcaatggaaggacatttgatgttttccagtttggggtgattatgaataaagctgctctaaacattttttaaaatcattatatatttattattttactttaagttctgggatacatgtgcagaacgtgcaggtttgttacataggtatacgtgtgccatggtggcttgctgcacctattgacccatcctctaaattccctcccctcgcccccaccccctaacaggcccctttgcagggacatggatattttggtgttatttctgaggtctctgttctgttccattggtctgtatatctgtttcgatacccagtaccatggtgtttcggttactgtagccttgtagtatagtttgaaatcaggtagcatgatgcctccagctttgttctttttgcttaggattgtcttggctatacagggtcttctttaattccatatgaaatttaaagtagtttttttctaattctgtgaagaatgtcaatggtatagcattgggaatagcattgaatctagaaattactttgggcagtatggccatttttacgatattgattcttcctatccatgaagatggaatgttttttccatttgttcgtgtactttcttatttccttgagcagtggtttgtagttctccttgaagaggtccttcacatcccttgttagctgtattcctaggtatcttattctttttgtagcgattgtgaattgggagttcattcatgattcggctctctgcttgtctattattggtgtataggaatgcttgtgatttttgcacattgattttgtattctgagactttactgaagttgcttatcagtttaaggagtttttgggctgcgatgatggggttttctaaatatacaattatgtcatctgcaaacagagacaacttggcttcctctcttcctatgtgaataccctttatttctttctcttgcctgattgccctggccagaacttccaatactatgttgaataggagtagtgagagagagcatccttgtctcgtgccagttttcaaagggaatgcttccagtttttgcccattcagtgtgatattggctatgggtttgacataaatagctcttattattttgagatgcgttccatcaatacctagtttattgagagtttttagcatgaagggatgtagaatttatcaaaggccttttctgcatctattgagataatcatgtggtttttgtcattggttctgtttttgtgatggattatgtttattcatttgcgtatgttgaaccagcctggcatcccagggataaagccgacttgatcgtggtggataagttttttgatatagtcactggtattttgaggtgattgctatcattatcatgatcttactaataagaaagcagagccacagagaggtaaaataagttgctcaaggtcacacaggctctaaatagcaaagtcagtatttgaatttagtgttttttgttgagctagggtttcactctgtcatgcaggctggagtgcagtggtgagatcacagcccactgcagccttgacctcctggactccagggatccaccccagcctccctagtagctgggaatacaggcacattccactatgcccagctaatttttttagttttatttcttgtatagatgaggttttgccatgttgcccaggctggtctcgaactcctgagctcaagtgatcctctcacctccgcttcccaaagtgcttgggattaaagatgtgagccactgcgcccagcctgaatttagttgttattcagtaatccatataatttgggaatgattgttcaaatggcacagactctcacaggggttcaatctaccattgtgtcagtgtagcagatgagatttttgtcaaggggcttgctgaaatccagggtaccatatctttagcattttcctagtctgtttgtccaataaccctgtttaaaaaaagaaacaagattagcttggatcggtttattccaagaaatctcatgctaattcctaataataagaaacaatgccaatagtgatactaatggtcctcacatttgctgagtcccagcctgtgccaggcactgagctaagcttgtcccatgcactgtttgatcatcctgctttctcgttgctcacacactgtgtactgacgtacggctgaattctcctgggattgacaatgagcttactggttatcactgtagagtcttctgtttggaatcaagacatttgctcaggttttaaggcctctgtttttatccccagtttctcacaagctgcttgtttggatgtcttatcagtgctggatctaagtgagcatttaatttggagctgcaggctgggttcaagtctggctctatgacagctttttatcaatgagaccaacagcaaatcactcaaccttgagctttggtcttctcctcttccaaatggagattataatccctatgcagagtatttccacagatgctgagatgctcatacaggagaatgtttgtgtaaaagtgcttctcagacttcagttgcagacacacttgagccatttttgttatttaaaatggttaagtgttcctactagtattatctcctatccaagtttcacttttaacagaatttatcctcccccttttagatttttaaaaaatattcataagacactcagaggtatgactgaatgttggtcactagacccagaaaggggtatacctaccagctcttgcccactgagttgtgcttgaggtggaagaaacagaattgcagactccaggaggaaaaggtatgcttctagaggtctttcatctagagcgaatctttcccaccttctcctaatcagcagaaatcattacaggaacaagacatatcgatcctggtcagagggcaccatatacatagagttctgttttcttctttttctttccaccctcccccagcctcagaaggctaatccagtgccacctgcgatttcttctgatgttactgtggaagggagggttacataaagagaataaccaggttttctcctgtggcacctgcagccccattttctcattgggaaaaccaaggtatgaaggaataggttaggacttaatggtgcataaactcagagccagcagtcattcttccatccctggtcttggcatttggaagatgagatccactatgttgtaagctctaaggggcaggaaatacaagatgatgtatttatgtaaatataatgtactatgttgtaatcatatgtgcatgcaggaatgaatgactgaataagtgaagggagaattcttttctacctgaactgtggctcctgctagtctgaaaggcatgcagcctttcttaagctttatgaagaggaaggctagaaagaagttcagaaaagcttcccccatctttattctttaaactctatataaaggcatgaaatgttctgagactgacgaaaacatgggcctagaccagcaaatgattttggaataacaaagatgagcctagttctctagctattgtcacctcctttgttgtgccagtggtggttaccatgtgtcctccttcactggaggatacagccaaagtgaaggatgctgcagtgtaaggatgcaggatgggttttctggcttcaaattcgttatagactagagtagcccagggcatcttcttactagatgtcttgcatcatggcagcaacacccctggtccctctggggtggatggggtgcagcacaccttggtgaggggtttacactaaatactgctgaccccaggacagcaatttctcatacatttttattccaaagtattcctgaaaggtacttttgcttcctcatgtttccacaacaaccccctctagagcaaggatataaataagaaagcaaaatttcaggctccctttacaatcacagtagctgttaactgctgaaagggactcagagaggggcccctatgggagggggaggcagagggtggagcaggccagcctgtctccctgggtagcacatccccaaagaatcctctgagcattgatctttgattgtgccccttccgtgctacccagcaggaccttctcccctaaagaagggtcactttgtattgaggatctccttcttatattgcatttgcttagagggtgcatggcctcagaccacattttggggctgatgggaagaagttggggcaggagggcactgtggtcataatgaggtcatggactgctaaagcttccagttctgaggggctcaggtttctcaacagagtgaagatcaaagtgtgttcagtgtggctgctgctgctgctacaaagaggtgtgaaatgtgggtttggaaagagaaccgaggataatttgctagtttatagcctttcctagagttcacacagaatttttagtactttctctccctcccttttttgtaactgtttcagagaaggtgtgagatcagcaggctgtgaacatcgtgcagtgtgggaaaggggagctgaggcatgggtctctgtctccttggccctgggagaagggattttggtgggagctgggggagtgtttgggtgtcatcttggggagcatgttggggagtgtgtgggatcaacattcccaccaccttcctccctgtcacctgggtgctggcttctggaaggctcagccctgcaggtccatagcaggactttcctggctgtgccgtacaaagtacctgacgatgagattgcttggaagggcatggggaggagccagtgacagatgtggtgggatccatagaaagggctgctgtggagcctctgcgtattactcaggagcacctactgagttttctgtacagcctttgttttgccctctggaaaatgccaccaggagctctaaccttactgtgatcaccctttgccattcagtgcctgcctccattccatctgacagctttagatatttgaacagtcctcttgctgacagctgtgtggagcaggagtgtcctgttcgcatgccaagtactcagactctgggaagacagagataatgaacttccttttcaccccagtgattgcctccgagttcagaactctgtgccctcgcatcaggctgtggctgagcctccaacttgctttgctcccttggcccagcatctctccccttcctgtctactttctcaaccactgctgggagaccttcctaaagcatagctttgctcatgttatccgctgggcagaaaccatccatgggtctcagtgctcatgagaggagggggcagagctggctcagcggcactctgtggggaaaggactcgggttatgttaagaaagtgagattgctgccaaaagggatcccaccctctgggcctgctgtgactgggattccaggccttgaataagattcagacagtcccatttttaaattcagctctggctagactgcctctgcagtgtttttgaaatgggtgctaccttagaagagcaaaaaggagtagtctcagatacaattgtccagaataactagggtttaatctaaagagtgagttaccaggaaatgagagaaggagtgaggacataggcctggagaagcgaataattccagaagcaagtgacatttgtcttggaacacttgaagggcagtcttgaagctacactaagagagggttactttgtgtagctccaagttcagggatgggctgtgctgccctcactgcaagagttcatatagatgctgggatgagcttcgcccaggaacactgtgttcctggagtttgggcttgattttctaagatcatatccaacttgaagtttatcagttcaccctttcctgccacatacatttatcgagtacctactacatgccaagcaccttagtttgtgttatactggaaaggcagcacaggctttgccctcagagaactcagtctagtagggaaaaacagataagaaaactgaattataagatagaagactgagggaaagggtggtttgggaaaccttcctgaagcaagtgcatgctgaacagtgttgaggaggagcagtttaaacctagccagggtgaggtgcatgcgagagccctgaaatgtgaaagctgggcacctgcaggaaaccaaaattagttcaggtgactggagggtggcaggcggaggcgtggcaagaggctggaagacaaggtggaagacagatcatgacattattctaaagtcagcatggaaggattggaggattttaaatgagaagctataagccagacttggattttagaaagatcactctagtaatggtctggagagaagaatacgggaggaaggggtagggaggcagagagaaaccagtaggtattcttgtgaaaaattatgaggacgttggcagtagggatagagaaatgaaactgttaatagagaaaaagctatggagttcctacaagacggtcttttgggaaagacagaagaggtgacatttaagttgagacctggaagatgagaataaaacagtcacgtgtagatgtgagaccaagagagctccaaattgaaggactagcgaagcccttgaaacagaattaagcctggagcattcaagaaacagagaaggctgttgtgcccagatcacagagatcagtggagacagcctgaatcttgcagggcctgggagaggtttgttcctgggaaaggtttgggctgttactgcaagtgtaatgagaagctagggagctataagcaaattggtctgacttacaccctagaaatttcactccactgtgtaaagaatggattacacagaatatgtgcaggctggaggccttgtagggagctgttggagagtggaaatgcccagcagggtaccaggtatgcaaggagagaggtctgtcctggagataaagactgggagtcatttgcatccaagtgatagttgggcacttcatttcagtaaggccttttagggagtgagtgtggattgaaaataaaagtggggaaaggcaagtatgaaactttaggaaatgtggcttttaaagggaagtggaggaagaggagtagccaaaggagaaaaggataactcagaaggaaagggaggaatttcaaggagagggtactaaannnnnnnnnnnnnnnnnnnnnnnnnnnnnnnnnnnnnnnnnnnnnnnnnnnnnnnnnnnnnnnnnnnnnnnnnnnnnnnnnnnnnnnnnnnnnnnnnnnggtcaccagcttttaggagacttcagtccacattggtattagaaagttttgattgtttaaaataaggatctctaatgattatggaagagctattttttttttctgtatttgttgacctttagtcatgtttgaagtttagcaatcagaacatgtactacagctcttaatttgaatgtaaactcaccatccaggcccacctagacagggtcacaaagagttgcttttgtgaagagctctcaatatttttgccaacttcagaaggttaggaagatactgcaaacaaccttgcttttttttttaagtttttttttttgtgtgtgattataaggaatatatttccattggaaaaaaaaatcaagaaaatacagataagcataaagataatacagataacttgtaattccactacctaaagacaatcactgttaccattttggtatatttccttctagtcttttttttccttttgaatgtattttacactgttgaattaatattttagataaaatattttccctttaaagttatactgcttttcctcttaagactatatgatgccttttccattgtattaaaagttctgtagaaataacatttaatagcatttaaaaggctgtgtaatattccattgagtgcaccatactttgctcaaccattcccctactgttaaaacactaaagactttctgtggaaaaccagtatggcagttcctcaaaaaattaaacataatatgattaaccatataaaccaaattgaaccataaaaattaaaccatatgattcagcaattccacttctgggtatgtacccaaaggaattgaaagcagggacttgaacagatttgtacacccatgttcacagcagcattattcacaataaccaaaaggtttcagaagcaacccaagtgttcactgatggaggaatggataaacaaaatgtggtctgaacatacaatggaacagtattcagccttagaaacgaaggtaggcctgacacatgctacagcatggatgaaccttggaaacatgatgccaagtgaaataagccaggcacaaaaggacaaatactatgtgattccactcatattaggtacttagagtggtcagattcacaggcagaaagcagaagatggttgccagggggctagcaggaggggagagttattgtttaatggtacagagtttcagttagggcagatgaaaaagttctggagatgagtggtagtgatggttgtacaacaataggaatgtacttaatgccgcagaactctacactaaaaatggtttaaaatggcaaatttcatgttatgtatagtttaccacaattaaaaatcttaatactgacatttttttgaagttgggtttattggggtataatttgcatttagcaaaatccattcttcttagatatacaactctgtgttttgacaaatgtatatagttggctaactactaccataatcaagatatagaatatttctatcaccccccaaattccttccagcctctttctagttaatcttttctcttcatcctcagcctctagtaactgctgattttttgttcttatagttttgccttttctagaatgtcataaatgggatgaggagtctacagcctttttggcttcttgcactttgcataatgcttttgagattcatccatgttgctgcatatatctgtagttcatttctctttatttctgcctagtattcagttgtatggatgatcacaatttgtttattcaccaatcgagggacatttcagttgttttcagtttggggcaattatgaatgtagctgtgataaataactattcattgctgggtcaaatggtaagtatatgtataactctgtaaggagctgccaaactgttttccaaaatgggtgtattattttgcattcccgtcagcaatatatgagagttacagttgctccacgttctaagcagcatttaatattatcaggctttttattgttttggtttggtttgtttttagccttctaataagtgtgtagtaataactattgtggttttaatttgcatttctctaatgattaataatgtcccatcttttcatgtgcttatttattctccttatctctcattgctgaagtgacctgttcacttcttttggccattttttaattaggttgcttgttttattatttagttgtagatgatttttaaattttttgctattatagataatgcttcaatgaacaacattgtatgtgaaaatattgccctcactttgggtctatacttataataatttcctaaagctactaaatcaaagagagtgaacatcttcaccatccttatatgcccatagtccaacagctcttcaaaaccattgcaccaattcactgtcctactggtggcagtttaataggcatgacaggccattgtgttgtcttaattggaatttgtttgattataatgctatggaactttttttcatatgattattaaacagtctgtgtttcttcttttgtgagtcatcatcccttgccttttttgatactggattgacatagaaatttgccatggctgtatctctacaggattagttctacagtatgtgatgctccatgccaggatcagcagtttacagtattttcataaaatcttaacttggtcttagcctcgtttctttcactttcggaggtcacgagttaatttgcgtagctggcaaggtaaaaataagagttgaagagaaagatttttgccctcaagttaaacttggacactgggtgtcagcacttctgtgagaggcagacatctctctgttgttcctaataaatagaaaaagtgttcttttaaattcctctctgagaaaatggccatgccacttagtttccctgttgtgagagtaacctcttgattcctctaacaactcagcattttatgtgttcacaatgaaagtacaattaaaatcacttacttcatgcttgcatagctctatcaaatagattcaggcagcaaacagttcctgtatataggcacaattcttttttaattattaaaattgcttatcttttattttattccaaatagatggtatgggatgtgatatgactcagaagtactagaatgaattttgacttaataactctaaaaataaaaagcattttgttttctctgacaaatagctctcgttcattttgatgctcgacagacagctgatattttataaaactttatgattgcctcttcatcaagcactgtaattgtaggtttgtcttctttgcaagtatggggaactgggtattttcttttaaatacttgtcatcctaggaggcggattgcctatgcctgtcatgcaaatcaacttttcaggcatcataggcagaactaggaaagtagaacaatggaaaaatatatatttttgtctaaaatttatggatctgtgacttgcctgaaagagttatttgagaaggtttttataaactcaaacagatcctttaaactagatatttcccagactgcccaaaaaagggccgctgtcccccaataccacacaacactatgagaaagtagaattttattgcttgggtttttcttttcctcatactttgaaagatctctttggccagctttccattcagtgttaacccacactcgtcagtgtttgatgtcatgagaagaggactctggcttgctcaaggatcatgagtgagtaaatttttcagtcttccagaaggggaaaaggaagcatcattttggtatcttagggattaagacacttgctaacatgatatcaagaaaaaagcttgcacactctccaattggtatactggctccatgccagttacatagttttgggtttttccttgtttttcatgtacaaggatacctcagagaatggttgtttggctccagaccactgcagtgaaacaaatatctcaagaaagtcacataaattctttggttttccagtgcatataagagttatgtttacactatagtgtaacttatacatatagtgtagtctattaagtgtgcagtagcattatgtgaaaaacaatgtacatctcttaaaaatactttattgctaagaaatgctcatgattatctaagcattcagtgagttgtaatctttttgctcctggtagatcttacctggatgttaatagctgctgactgattagggtgctggttgctaaagggtggagtggctgtggaaatttcttaaaataagacaagaacaaactttgctgtatccgttgactcttcctttcatgaaatatttttctgttgcttgtgatactggtttatagcatttgtctcacagtagaatttctttcaaaattggagtcaattctctcaaactctgctgctgctttatcaactaatttcatgtaatattataaatcctttgttgtcattttaacaatgttcacagcatcttcatcaggagtagattttacctcaagaaactactttctttgcttattcataagaagcagttcttactgtgaaagttttatgagattgcagcaattcagtcacatcttcaggatccatttctgattctagttctcttgctattcttaccacatcttcagttacttcctccactgaagttttcaactcctcaaagtcatacataagagttggaatcaacttcttccaaattcttgtttatgttggtcttttgacctcttcctatgaatcatgaatgttcttaatggcatgtagaatggtgagtcctttccagaaggttccaattgactgtgaccagatccatcagaggaatcatgatctatggcagctgtagtcttctgagatgttatttcttaaatagtatgacttgaaagtcgaaattacttcttgatccatggactgcagagtggatgttgtgttagcaggtatgaaaaccacattaatctttgtttccatcagtgctcttggtacactgtcaatgagctgtaatattttgaaaggaatctttttttttttttctgagcaggtctcaacagtgggcttaaaatattcaggaaaccatgctgtaaagagatgtgctgtcacataggctttgctgttccatttatagagcacaggcagagtagatttagcataatttttaagggccctaggatttttggaatggtcagtgagcattggtgtcaccttaagtcactaactgcatttacccataacaagagagtcagcctgtcttttgaggctcttataagtctggccacaccagttttaccatctttcactttggtttcttatctagatggtattatctatatggaataggcaagtgggttattgtgagtgacagaaacctaacttggactagtttgagcaaggaggtacttttcagggaaatgatgtttcacaaaactgccacgctgcaggcagaattagaaaataggccttgggaattgcagaaatagggctccaggtccaccagaattatttcctcttttcattccctcttggccctgtaagattggctttatttttctctctcactgtagccagttttcttctggaagagaaaacatggatagtgacagctcttgagccttttagcttatggcttcagctgcttcagaagagatcaaccaaactctattggtcctaactccaaacatccagggaaggaacttcctgcccctgatcctgttaactgtggccagtagtgccatgtaagagcactgaaatttttggaaagaccttagggatgaagtattgttgtcagaggaagaggagggactggtagtaaaaacaataggtgtacattctttgtgggcagtgctggattatatagctaatcatggggcttggatactggagttcattagtgcatcttgtaacaaggccacttttgggggtgtggctcccacatggataattagctggatcctggtcttcagctgtgtcctgctctatccctgactagccatctcacaactgcttgttcctggtcctgggggggtacctgcggagagaaagtgtgtgggtggtagatcaacagaaatccctcgccactgctagaaaaacaactcaaagaacatgtatttatgtagatgatttcttataatgtgggatttccctctccagcaattttcctttgccaactctctgaagcacagttttggtaacattcatatgatgctgcaatcataggataccataaagctctgcagagaggcaactctggttgtcctagagaatgcatttgtcaaatatatgtgcctttgggatatattactagctattagccattatctttcgtagcttttgaaagcactccaaatttggaatctaaatttctgggtttgagtctcagcttgatcacgtattatctcagtgacctggagctagctagtttctctctctgaaccttaattctcaaacttataaaattgggatagtggtacctgtatggaacagggctatataaactgtgaaacaacaataagaaatgtttctttttctttttgttatcacctgggcctgaatgacagagtttttctccatctcttggcatttctcctagctgtgtctgagtgaataatcagggactttctcagaaaagagaaggaaatgcaggaccattggtaggaacttgacctttgtttctatcatactgaggttaagcaaactctttatttctgtattcttcgtctggcatcctttggggaacctcttcttgaggttaaggtgagatgaaggcttcctttggagacacgttcaggccaagcttcatgctctgaggagttgtttcaggaagaaagagagaggagctatgtgtatgttctcccagtgtgaatagggactaatgtgaaacatatgccattgcctttaatcaggctattaagcatttctcagttttgatggaacctctatctgagaggttcacctatagcagtggttctcaactaggggtgatttttgcttcccagaggacatttgacaatgtctggagatgttgttggttgtcattgctgggtgaggtgggagggggttggcaggaggggttgccacaggtatctagtggttagaggccagagatgctgctaaatacactactaccatgcataaggcagctccccaccaccaattgtctgtccccaaacatcaatacaacatcttcttcttagtgtggtggttttgattgttgagctttcttttggtggagaaggagaaaggatttttaggccatgatttttattctcatcaaaaggcatatattgagaccacttcatacccgctaggatttttctgaaatttaattatgaatgccattttaaattccagaaggggttgccttacttttgttaaatacagtactctttattccctcctagaaatggcacagatctctcttggagagggcaaggtgactctactccccttctcatcctcttaagaaatatcatggcttcttatctgttatatattgtctgtggtcttagaagaaagtctgtgctccagtttggccataaattaactcagagccatatgtattgagcaatataccccaccaagctgtaaaacaaatgaacaaatggaaaacaacaaaagaaactccaaaccaaccaaccaatcagaaacaggtcactgccccatgacagttttgaagtgtgtgtgaaagaggagaaagagctttaagactgtccattctggagggcagcaagatgttgttgcttcaggtagcataagagggaacagattctcttctacaatgccatgtttgtggttcttggaaaagcacagcaaaacctttcaaggcaaactgtttcatcattctgggataacaccaagaagctgcatggtgctattaaagcagccattcatgttggtctgccttgtcttctgtagaggtgggttttttaaactgtggatcagctcctttggagggtcatgaaatgcatttagttgattaaaaccttaagtaaggaagaattgaagagaaaacatgagtacatcacacaaataaagagtactgttttatgaaacattatgtaattttatgtatgtgtgtatatatatatacacacatatatatacacacacacacatctggcttgtgatgtaaaatacattgcttaatgtaggctatgatcaaaaaggcttgaaaatcaccactttatatgcttttacctttgttctagaacataggtcaattgaagcccaaagtgtattttctgttctaactcaggggcctgagtttcattacctgcttacctgctcattcctaaaccagtcactacccaggacagtggatgatttgcttatacgaatctacattcacccacaggggagtctggagagctgcctggcctccccagcatgcatgttgtcagggaaggctgctgcagagaaggcagccagcacagccgccccaggaatggcctgtggggatagagaaagtagcattagtttaggtacagagaccaaggtaaacacccagttatggcaactggggctggggcttggggagaaggtaaaagaccaatagttaatcaggaaaattcttttgagcttagagtagcagtgtggttaacctggtgttccattgccaaatttaagcctggagttctttgaacactgccaggcttggtccaaaacattaatacagcctataaaattttccttctgtgacatttcccagtctctccagatctgttcattcattcattcattcatttatttttgagacagagtctttctctgctgcccagactggagtgcagtggcatgatcgtgattcactgcagcctctatctcctggggttgtgattctcccacctcagcctcccaagtagcagggactacagacacatgccaccatgcccagcttatttttatttattttcatagagattcgtagagataggttcttgtcatgttgtccacgctggccttgaagtcctgggcccaagcaattcctccaacttggcctccattaagtgctgggattacaggcgtgagccactgtgcctggccctcttcggactccttactgtctactctcccctgattcattaggtttcagccacaccagccttgtttcagtttttcagatatgctggtttcttttgtgcctcaagactttctgtgcaggcctttttctgcatctgggatgttcttcccacattgtttcctctgacctactccagcttcactttttagctcatctgccacttccacagtgaagcttccttccctgacctttcgcttatcataattgagacctatttaatgtatgtctctttcattaagtatcgcaaggacagccatgatcaccatcttctctactgtaatgccagggcctgctgcatggcatatggtcagaagtatctcgattgtagagtaagtcttgggctctgggatggagctaagcctgatggcatcaaggggccccggcagagtaggtggggaggaagaggcagcttgcagccatctgggctgggcttgacatcttttacacctttcccagcctcgtcctcttccctcagatatatttccttggtcaagttgattttctttggcttatctctatgtgaacagtttaatacacagggactttttaaaaaataaaatgaagtaaagtctccagaaattgattcccaaatcaaatcacacttcagtaatttaaaagaaatagagagcaaaacatcatgtgtaattcagtagatttttgatagatcataattacttacacatgtggctacaccccctttaatttggatatccaattattaggtgtcatgggcccagtcacagctccgtggatgcgtctgtggatgagtccaactaatctgcaattggaaatgtattaacacccacttctccttgagcgaagggcatttctagagcattactgttgcatattgttccagaaggagccatagtgtgtggaaatgggaaagatggtttctgccatcagggagctggttttgaactgagttacgaggatctaactcattaatgatcagacccatgttctaagatataagaactgtatgtaattgggagttaaacatagagcagctctctggatgttgagaggaagggagattggtgtgagctacagaagcatagcaccatcagggcaggtgttggctcacagagttagagccaggaggggtctgagaggtccgtttatctgatcatttcattttatagataaggaaactgatatattatttctcttcttcctctgtaacacctaattattttctatgagccaaactgtagtagactttttttttttttaaagttcttcctcattcagcttccccagtggcaccagttttcccttttgggaagatcttattgtgtgttcctcggggggagtcttgctcaccttggaagtggtaggggatttgggtgcagggggacttaaccttgaccacacgcttcttctgactttactcttaagctgatgatgcaacaacagcaagacagttgatgtttataatcataccaatagccacagtggcctaagaatcagatttcccagaatctctgacctttgccaagtgtattagtttcctatagcttctgtaacaaatgaccacaaatttggtggcttaaagcaacacgtgtattttcttacagttctggaagtcagaagtctaaaatcactttcactaggctaaaatccagggttgtgcttcccatctctcctccccagaggctttagttcgtttctttgcctctcccagcttctagagctacattcttgtgttctttggcccttgggcccttcctctatcttcagagtcagatgcagaataacttgcttctgtccttacattgccttctctctctctagtcaatcttctgcctttttcttgtaagggcacctgtgattgtgcctcgagtccacctggataatccaggttattctttccaccaccagatccttaatcccatctgcaaagtcccttttgccataacaggtaacgttcacagatttctcaattaggacctggatatccctgccccaacaaggtttctgctttcctcttttcccagcctggtcttccaatatcccctcaattctgtgagttcctggtatcttctcagtatacctttttggagggagggagctgatgggtctgcagtttaagacagttgaaatctgtttctgttgtttatgaccaggaacctccatggtaaatcagtgctatgtgcagaactttacaagcattatttttttttaatccttgttttaactttcttaggaaggcactatctcctttttccaggtaagaaaactgtagctcagagtggcaatttcaaaaagcctgacagctagtataggtgatggaactgggatttgaaactagccagtgtgactgaagagcgtgtgccttatccctttctcagaatcctagttcaactagcttttggtcttagaccttttccaaggaggaagtagaatgtcatctgggccctgaggtctgaatcaaattgtttaggcaggggagagaaggcaaaggagaagcattccaggtaggagagaggctggagactaagaagtgaatccaagagatttaaaggaagggacatgacaggtaaagtggaatgacagataaaggaaccaaccacgtatggaatgcttttgaatggacacagcaactcatttatgtcaactacccatgggaatgatattctgactcaactttgtgttggaaattcagcttgtattaggtcccttgctgcctcctcatggcctcctcatcacatgggctggttaaacatctaacatcctttgctagtgttagccttttctcacagatgctgatgaacagcctgtctttcaaaaacttaacaaggttctttgttggtatcgatatgggtaatttctggagcttgggagacatcctggacctaatggtgtaagatctctggcttgtgtctcctttcagaagagaaattggaaatttttttctagggctgggacaatgactaagaagggagctctttatctggtgttttctggttactacttaagtgtaactgatagatttagcaaatgaaaatataagacatccagttaaatttgaattttaggtttcagataaacaatgaatattccatgcattgtacaaacattgcactaaaaattatttatctgaaattcaaacttaactgggtgtcctgcattttggctggcaaccctgaacctatgaccactgtttcagggtattttcaggcatagacttgtacagtgaatgtgcctgtgaaaagatattatagacctggattgacaaggaggctaggaaagaaccccaagttcaaagggaatgcaaggttggagaattctttgggcgactaacttggggagagatgatttggttctcattgcccagagcattgcctctgtcttctgttctgctgtgccactgtgctatggccacaatgagaaagacttgtgctgcatcatcaggattgtatcaatctccattctcttcctatttgctgacacctaaaagtaaaaacattcaaggtagggttgagccatgatctctaacaggaaatagttattgaacttgactgtgtgcagaacatgatacctgtgctggtggtggtcagagggctgagtgtactctccaactgtcctctgttgtgggggcaaagtgggcattaagcacccccctgtatacagagctttccaccgggctgtgtgcctatagtgacaaaacaaatggaaaacacgcttgtgctcttgaggagcacagatatatgcctcttgggacagcagagagcttaggcttttattaactcaaaattggagttattctcagtggccccactctgattttgtggtgtgtgtgtctctccatgtgtgtatatagaaatattgcagcaatcatcacctgccattaagctacttttgtacatagtaattaggagaggtgcatggagtctggtcctgagagtgagatatggcaagtgatctgtggcgcttggtaatttgtggccttagaatgaagggaagaatgctcacttgcctgtttggggatgaaaactaaaaaatcttgatattttttagcaacacactggactaaggaacagtggaccctcccagcactgggcaaacattacacagcgtaatggcagggtggggaaaggactggatttgacatcagaagagaactgactttaactcctgatcttaccatttattagcaatttaattttttctgagctttggcttgctcttttatgagatggagacaatagcaatatgaggaaaattttgaagatttaatgacataccacttgaaaatgctaactgacagcaagcaccttgtatttgtcactgcggtgtttcccattctcatagcactttgtaactaactctgttataatgcttcatggtgtgttataattatttcttttatgtgtctgtctacttccactagactgagaatcaagggccattttcaactctttacttttccagtagcctcctgattaagccctggtacttacaaggcccatagttttgctgagctgtgtgtacttcaatacttaagctttgctaggaggcaagtctttaacttctgagtttccattctttcctctgtctctctagctctcttactgagaactgggaagatcccacgggacaggatctgtccagtcctcagtaagagtctttcaagaatattaccatctcaacaccagtcagaatggtgattattaaaaagtcaaggaaaaacagatggtagagaaataggaatgcttttacactgttggtgggaatgtaaattagttcaaccactgtggaagacaatgtggtgattcctcaaggacctagaaccagaaataccatttgacccagcaatcccattactgggcatatacccaaaggaatataaatcattctgttatcaagatacatacacatgtatgttcattgcagcactatttgcaaaagcaaagatgtggaatcaacccaaatgcccatcaatgatagactggataaagaagatgtggtacatatacaccatggaatactatgcaaccataaaaaggaatgagatcatgtcctttgtagggacatggatggaactggaagccattatcctcagcaaactaacacagaaacagaaaaccaaacactgcatgttctcactcataagtgggagctgaatgatgagaacacatggacacagggaggggaacaacacacactggggcctctcacgggtaagtgtggggagaggggaagggagagcatcaggagaaataactaatacgtgccgggcttaatacctaggtcacgggttgataggtgcagcaaaccaccatggcacacatttacctatgtaacaaacctgcacattctgcacatgtaactcagaatttaaaatttttaaaaaagaatattagaagatcctcattagactctaaatgcttgagtatagattcccagtattctcctgtgtactcaaacacatgtatgtttgaatagtatcccagcttgctaccctattctcagtaagttctaggatttccttgatgttctctccttttgacctctgcttcaacaaatttattaatttaatcagtgcaattcaagttcaattcatcaagcctttattgagtgcctcttacttgccagtcactgggctaggttttgggggtagagatgagtaaaatggtgcctccattagaagtgtttcagatttagtgggagagacagatgagaaaacagaatttctctaggatgtggttagggcagtgatggaggtggacacgttatgggagcacagaatagggctattttcctttattgtctttttcctctaagaattccattgttgaccaggtatggtggctcacacctgtaatcccagcactttgggaggccgaggcaggcggatcatgaggtcaggagttcgagaccagcctggacagcatggtgaaaccctgtctctactaaaaatacaaaaatcagccaggtttggtggcatatgcctgtaatcccagctactcgggaggctgaggcaagagaatcgcttgaactcaggaagcggaggttgcagtgagctgagatcgtgccattgcactccagcctggatgacagagcaagactctgtctcaaaaaaaaaaaaagaatcccattgtccctgcttactttctaacaggtgaacggggagccggctgtcattcctgcctcaaggagtattggaactgtgggagttaggaagctgccagtggccaatgtgcatcaattaaagacccagttggtagccctcctgcactggaggacagaaaagaacacttggaggcccaggacagcacaaggccacaggctgcatggccctggctgcagtgtggttgggagaatttggggagcaggtagtttcagccaaagactaacttggtgacatgcgcatacctcatggctggctctgtgagacccctgcaacaaatgccacctttttccttccctttttcaagttagctttgcttttgttctctttcccatttctctgacatttgcttctccccccagttcttatttatttcctttgttgtttatatccctacattttcttttactgctcactcttctatcatcttattcttctttccctctaccatttttcccctctacatttgagccttctttgccttttaattttatctttctgcctctatcaccatgttctgaaacataactgttaaactcagggttggagaggaaattttcatttccaacagggctttttatgatatgaaaagagtgtctcatgtgtatctgagtatcctaggaaacagaagtctaatttctaactcatattctgcatactgtgtttgaaagacatcatcatgaaaggagagtctcccacctgggcagcacaggagactgtgctgtgcaccttacctttattacaagaaccagccaaacaatgattccttcttttttgtggttctctatctccacacctatccttgaagtttctctttatctcgctctttctctttttctatttctgtcatatttttcagttctattttctatgttgcttctcgttcttttttctctttagtccttccctacttattagaaattatatgaccccctccttaatgtctttccttggccttggaagatagagtcaaaaggagtgtggaagactccactgccccaagtccccccgtttctgacgacggcatggaagtgtgactcaggagagatggggaagattcagaaaccttgtctagctcttgagattctttatgagtaggatttctttctgcttcttatttttaggtagtatgaacgtagactcagagaatcttaaagttgacaggaatctctattggttgtttaaataacctttaccccatgtaggatccctctttacttcctaatgatgctctacaggtagctcccggatacttggagttttgggaagggtgccagcacatgaagccgtccgcttggctgttggcagcactaattgtgtcagttaccgcttgcgattctgttgtcctggtctgtatgatttgtacctaatgattgtatatctgcttccgagggccatagggcatgcactttccatacagttctttttctgagattgaagacacgtcaaatagtgaaggaagttcaggtaccttctttaatacttgaactatttcagagaggttccatcagaaataaacaaaacaagccatttttgccaccctttgactatagaggaacccagttttctgaatgcctcatttcctgatggttctgagtagctgagattgttctggagggattatgggtgagaaacttcctttcattcttcacagaaagaagaataaaatgagcaagttttaaattaagattttattaatattagtaagctttgcattagccacaatgtctgtgtgtacattatagtttatagaacactcttaatattaaataccatgtcattttatttttataactagaccacgatacccccttattttagagatgacagaagtggggttcatagaggttgagagacttgtgttgagttaccccattctcaacagagtgagtcagacttaaactcagttcttctgctcttaatcttctgctatgtctttcataaatacatatatgtccttgtctctccaaagtccctgcaatgtcatgagattataggaaataagttgtctccttggtgtacacaatctaatagaattatggatttgtatgtgtgtgtatttctggatttggctgtggaacatggaaaaataggaagaaatccaattagggtcaaagagtggtttgtgcaattataaaaatactgatactatgtgaagaccattgaaattcttctccagttgcaagcatcagcataattgatttgtttggtaaaaattctgtcaaggtagagatgagtgagttacttttttactgcagttaatccagagaaatttcctgaaggagatagacaggggaacctaagaaaattttgaaataaaaaaatacaagggcctggtgggttggaaagaggggaaggagttgaaacagggcagagaggagaaaggggacaagtgttggggacaggaatgggacagatgttgtggcccttgtgttttgcttgggatttggaactagggttctggtatgatgataagttttccttctttgcaaagtaaaacccagatggctaaatttaattccacttggagccactggtgattcacccaagctcaggtgcacccacatacagctggcgtcagcgctgtgtgctttccaggctgagcttgcctcagccccgcttcctgcatggaacaagaggggaaaaccagactggtaaccttgacccttctgtgtctctgtctgcagcatcctggccactgcaggaacccacttcaatactcacgtggacctgaggaccctccgggctgtgcgtgtcctgcggcctttgaagctcgtgtcagggatacctagtgagcatctgccattctttctgctctgctaagaactttcttcatgtgtcctcagctggatccaggtctaagggaatttgggataaacaaacaatattcctcctgggaggaagcctcagtggtaataaatagtggagatggagcaatctggtgtaacattttactttacatttaactttttgcaaatataaaagataatagaaaatctttacagaaaatgtggaaagtaaacaacaaaaaagaaaagtgctctttatcttatcactcagaaatcacttttgttaaaatttcaatatttttcatttttcccctgtgcattttaatataattgaaatcgttatgtagattgtagttttatatcctgaaataagtattttattttcctaaccttaaaaattcttggctgagtgcagtggctcacacctgtaatcctagcacttgggaggctgaggtgggtggattgcttgagttcaggaagagtttgagaccagtctgggcaacatggtgaaaccccatctccacaaaaaatagaaaaaagtaaaaaaaatgtagctgagcatggcagctcactcctgtagtcccagctactcaggaagctgaggtgggaggatcacttgggcctgggaggccaaggctgcagtgagccaagatcacgccactgcactccagccttggcgacagaccgacactctgtctcaaaacaaaaaaattcttatatgtgttatgatttatttagccatttttatgttttatgttgctggatggcataaaaaataaaaataggctatttccagtttttctccaactataaatgtgctgcaacaaacacctttttacttaaatctttattcaaatctctgactgttttcttggctagaatcctagaaatgcaatgtgtgggtcaaaggatatggcattttctgaatagtgcttgtactaattgtgcttccccaacagagactgagaactgggtctgagatagagtgaatgggaagatgaactttatcccagctcttgaaggatttacagcctagcagagctgggcctaatttcctttaggaaaggagcacattctaataaatttaatctatcagaggcagacggcagcatggatgaaaccaatgagggaatgaaactaatcctcccctatcagatggtgctgagggacagctgcattggtcattctctgtccttccttctaggcctgcagattgtgttgaagtccatcatgaaggccatggtacctcttctgcagattggccttctgctcttctttgccatcctgatgtttgctatcattggtttggagttctacagtggcaagttacatcgagcatgcttcatgaacaattcaggtagggtcgttcttttctgtcttctccttttcccttctcccctctgttaactggggtaatttcagggcacttggaggctcattggaaaagtatgtcctattctgaccctggaattagaatcagaagcttctagtcagcagccttttgaggcacagtcaaccaagactagatatcctcacttgacattaatattgcaaagcaaatatgtagttggaagatttcaaatagatggtcttggctcccctatcccatggtcaagggccatgggaatgaacttgaaaagccatctgtctgagccaggcatagtggcacccacctgtagttccagctactccctggaggcttaggcaagaggattgttgaagcccaggagtttgaggccagcctggacaactagtgtctctctgtccctatctctctgtctacaaaaaaaaaaagtgcaacctctctgaatatctgaatcaatacccctttactctttgtacagcagcctctgactgaataaataagtactttttgtatagtggcctctctggcccacaggctggtgagatctaggagtccagagtcagagttgggtccctccggatctgtggagacattttcccttcatgatccttctcaccatcttctcgctctctgttttgacccacacgtggtatggaagaactgagggagctctgagcttggtttgcaagtgtgcttgggagattgttagggtacacaaccccaaattctcatatctttgtatttcatttgttcttttcaagttgagttgagtatcctaggaggaaaggagatgggaggcaggctgaagaattccaaataagtaccatgctttttatgaaaagaaccttaaaagaacactttccaccttggatttctattttttatttttatcttttattcaaaaccaggaatccacgctggaaaaacaaggagttaaacccccctaaaaggaccatagtttataactgtccccaagaaacccaggaagaactcagggctcatcctggagtctgaagccagaaaacctcactttgccttttcctcaaagtgtgccgtgtgattcagtcctcttaattcctgtggtacttcaggtgagggtagaggatgaagcttgcagagagcaggggactatgtggaggagaggctccatttttcaggagactgggaaacattggattgaacacatgatatgtgagctgggaggtgcagagaggccagggaggagagggagcctgagacaaaaaagggcaggcctctttccgtgggggaatggaattgcttgcctatggcttcctggggtcatttccagctcatgcgaaacaccatgtgatttatctcctaccctccaaatgtgtctgcaggtattctagaaggatttgacccccctcacccatgtggtgtgcagggctgcccagctggttatgaatgcaaggactggatcggccccaatgatgggatcacccagtttgataacatcctttttgctgtgctgactgtcttccagtgcatcaccatggaagggtggaccactgtgctgtacaatgtgagtagagctggtggggacctggaaggaggagggaagaaccctggatggaggcttctgtggttgtttggcctggctagtccggggacagggagggctatggatataggtgtattgggatgggaggtgaagactcaactgggataagccttagcagttcataaccctcttttgtctggcctgttgctacgtacaagtacacagcttcttaatacgattaggaaattacatcctatgttggataggtgaacaaattagttaagtcagatcaacttaatagttacagaatatgttggttggacgtggcggtagggtatagtgaagggtactaatgtatgatactggctgcccagtagaattagctggaagccttaaaaaattttatcaccccctcaggatctgggagaatttactaaaaaagaacaaaaagaaaagaaaaaaaaattataccaactgagctccatcccacaccaattaagtaggaatatttaggggtgaaggtcattttagaaaagtcattgacttttctaaaaagcttcctatctgattctcgtatgtagccactgtcaagaactactgcattacacacacataaaaagcatgcttaattgtgagattcaccaggggtgcttgttgaaaattcagattcacagaccccttctctggagattctaattttgtgtagctttgtatagctagtgagctgtgcttttttcaagtgccctggtgattcacatgatcagacatgttgagaaggttctgagttggtctagctgcctgtcagggatgttggggattcctgcatggggacagaaggtagggtgatcatgaagtctcttccatcttccagagtctaattttaataagttatcaaaggcttggtgcagactctatgctcaaaaatgagagtgacttgaggtatgtggtttgatgtacatggatcctaggtgggtaaagcagtttgggcaggtgcttttgaaggactgtacccttacctgcattcagccagcccaccccaaaacagtaactttggaatgatcatgcctcttatgcacgctcccaccgtctgcctttaccttaaggtgccgtctgtttccttcagttcttctctagatctttttagcctgattctatctgtataaaacttattaggtggaacataaggtggcttatacaaagcaccctttagaaagagctttggatataatttacactggagggaaaggaaatgctgtgtctcagaagaaactcgacgagactataatgcccaaagagcaaggattgtgtaaggcctgtaaaaggaagtacttagtagaggtccattgctaacctggatccattcccacataggatgagcaaggcaggactgaagctttgcagaaaagagtcactggctattatgctaaagctctaaagggcagtgaagaagtcccaaggaccagcttacacccagcaagcccagggatgaagtgtgacccagaaagccctggaggacactctgcagttctcaccagctgtgggaggcagcaggaaggaggggagggaggcaaggttgatgagtgcagtcactcctcatttgagatgtaaaggttgtcttgaggccatgccactcaaattagccaggcacctctaggaattgcagcactggccctgcagtggctggtgtcacatggagggctttgagagtgatgcatttcaattatatgtgtagactcacctaagtgatgtgataaatgcattgaaagcctgaaaggagaagtgttgcatttgaggatacaggcgtgattgttggtcctctttagccaagattcagatggtactgagaggagaaggagcacagctgaagaaccactcattttttctttattagtttctttgttcattccttcattctttctgtgtttattaactgagcatctattacatgccaagcactgtcctaggcactagggaaatagggagaaaaaagtgccatgattcctgctatcatagtgctctcttcaaatccctctctccccagttacctgtcaaccacaggtttagaagttacacacaggcagagattttgctcctctctctagttttgctcactaaggagggaaggagggaggggaggagatcaagttgcagatactttgaaaccttttattgcatgggtgtccagggcccacagactcacatactctgacttccagcctgtcagtcattgaacttgagtttactgaaggcctcctgctattctgatggctggatttagggctagggggactgttacccaaagactgtctacctgtttggactgtctgctacctgtttggactgttcctcacacacacacacacacacacacacacacacacacacacacacttatacacactggttgcgtaccatgaagttaactatgaatgactagtcagcttagtattataaatacatgtatacatatatatgtgtgtgtttctgcatatagaaaaatgactcactaagcatcaccacaaccaccaccaataagatacaaatataaatataactgtattgattttcctttctaccactcctcattctgggaaggcccagttcacccagctgctggatttgttcatgaagagcactaagagagggggatcccctatttcccagccctatgcaccttctattcagtggtgcaacgaacatgtaagatttattgttgttagttacatccaaaccagtaggagaatcttcaggtttacccagtaggaagaagctctcaagcatgtgggctcagtttaacctttttatatgcaatgtaaatgcttccctcatgtttgcctcccttttctgtagcacagactcttcctagatgcctccctatgaccttgtgttgctctgccaatgattactattaacttcatttgcttgtggcttttctcattataatgaattgtaagggggagggttcccattgtcaaggcaacctggagtcacctgtgcttcatttagtctctatccaaatgtcaactgcttggtcaaactccaactatattcttggcttccctccctcctctggtggaaggaatgcaaaactgtcgacagttctggctattgctacctgtttgcactgtctgtcccaaaggtctcctcgacttgcaaactctcttctttacttatttctcgtaacctgataagtatgtcttccacagtacaatgtgttctccttctgatcaatgctcttcattcaacaaatgttactgtggctcgctaaccctcttcacctgggctggaggtggctgagagaagtgactttcttctgattctgatctgagtcttatttctctttgtcattatagttttatgttatctgctgattcagttagctcttttattgtatcaggactaattcccagattgcagaggttcccagtccctgtctgcagttactcacatctttgctcctgaagtctagtatgtttcatttgtatttctgtagttggagttatttctcttcttacttactgttgataaactcatgtagaggcagaaatttcttggaggtgtactgtttctgcagctttgcaggtatgctttccgcatctgttgtgactacttaagatgctccaagctgctatggtggaaggggttttatggacttcattggcttttggcaagaagaggcaactgaaagtctggatgctttctgagagtcttcccaactcctcagaaatcttttggtctataaacaatgactgtggctgtcttttaagttgccttttcacagctgcatatagtcaggatttattaaatggttaacagctattcactttctgtctcattgagattttgctttatgttcctctatgagcatggtgaggcataacatccatctcgcagttgatgaaaaactaccattctctttatgaagttcctctcattttgtggtatctacagagaatgctttgggttctgagatccatgagactagggaatgtggcttccatctttgcttcagtcttttcctaccacctcctccacattatagtagaactactcaaaactaatttgacaaataggtggcaggagtctatgattatcttatggtgctagagtgataagatgaaccaactgacctaggatcaggtgtatagttcctaaaatttgtagacactgtaattgtgactggtattgtagatactgtaagtgttactgtaattgtaattggtatccaggatcactcatgctctggaataaactggtccccccccctgcctcaaacaaccccatctggactgccctgttcttatgtccttgcatgagtctgggatcctgtaatataggtgatgcttggaattggatactagtatctgttcatctgttacttatccatagagggattggtaagtggatcttggaagttactttctttttcccatgacggctgggaggtgaggtgtatgtgcttagtgaggagctatgataacttctttttaattggcagaacaccttgcttgtcaggcttttcatggagaggagagagtagagggagagggaaactatttcctgaactcatagtaaaggcttttcccctctgtttacattcatacataagtatagattcattcactaactcattcattcaccaaataatttttaagtggctactatgtgccaaatactgttctagatgttggtgatacagtagagagtaaaacataggaaagtcccggccctcatggaacttatattctagtgggaaaatgcatatagaacataaggaaaacatatggtatatcagatagtgatagatgctgtggagaaaaaaaatgtggggaaaaagagaacttggttgcaattttaaatggagatgtcaggaggaccacattgagaagatggcattcgaacaaagacttgaagtgggtgggtgagggagtgggccatgtggttatctgggggaagagtctcctgagtcccagatagctgggccagcaagtgcagagatcctgagatggggacgggctgggtgtatttgaagaacagcaaagagcacagtgggttgaactgcagtgagtgaggcggaaagtaggagatggaatagtcagtcagatcatgtggagccctgaaggccattatacagactctggtttttactctgagtgagatgggaaagcaatggagggttttgaggaaaggagtgacatgacctgacttgtgtttgaaaaaggatcactccacctcctttggtagagcaaaagtagaaacagggattcaaatcaaggttatagcaaggatataaaaaaaatgatagaggcttgggccagggaggtagcagcggaggaggtgaaaagtggttggattctgcatatatttttaagtagagctcatgggattcttcgatggattgaatatgagtttgggagaaagcagcaagaagagtggagttgccattaactaagctggggaagaacacaggtaaagtatgttgggaggaagaggagaattgagtttggatgtgttaaatttgccatgctcatttgatacagtagtatagggaagggggtgaataaatgagttcatggtagaaggcttggctggagaaataaatttgggagttttcagtgtatagatggtaaagtattgagactggccaaaaccaccaaggaagtgaatatagacagggaagagaggagattccaggactgagttctgatgttaaggtgaagaggaaaacggttatcagcaaagaagactgagaaggagcagtagggaggtgagaggaaaattagaaacctggtgtcctggggccaagtgaagagcgcgctgcagagggataaagtagaggatgatcaagtcagttctctgaagaagtgtttttcctatcatatgattattcagttaaaaaaggttattactagagtatcttgcaaataatttcttggtcatttgtataaattcatccacagattctcttgaattcacattcatatttactctttcaaaaactcttatctatatgctttgctcatttgaatcaaatgcttcagatgggtcaaggaaggtgagggctaagaaccactgaatgccaggagcagtttgagtggagtaggaaggatttcagagagcaatggaaacagcgtggaagaaataccacttacatgctgatgggaatgatccatttgagataaaaattattgttgatgaaggagagggaggagaattggtggagtgatttccttgaacaggtgtgtgtgtgtggtgtgggggaggtctagaccacagatgtagggattggcttagataggagctctaatcatccattcatagtactaggagtagaggaagaacaagtggctgcaaaggctggtacgtgggtagatgtggtgttggaatcttgtagaaattctcttcctattgcttctattttctcaatgaaagaggaagtaaggtcatcagcagagggtggaaggaggaaaatgttgaaagtttgagaaggtataacatagttttccagaagactgagggagtaagtggagtaggaaatgcattgggttgctgggcagctttatggactcacttggagttagttgtgatgaagttcaagtgagaccagtgagcctggtgtgttttcctctggtcacattcagccactgaatatgggaagtaggtggagatttggcttttatgagaatagttttgccagttgagcacaataaaatgagagaagatcaagagagtgactataacatagccatggaatttgagctggataaagagcaaagaggtggcggagaaaccgtgaaaagggaggagagaacgtggattatagaccgtttttaaaatgtgactcttagggccgggcgcggtggctcactcctgtaatcccagcactttgggaggccgaggcgggcggatcactaggtcaggagatcgagaccatcctggctaacacggtgaaaccccgtctctactaaaaatataaaaaaatagccgggcgcagtggcgggcgcctgtagtcccagctactcaggaggctgaggcaggagaatggtgtgaacccgggaggtggagcttgcagtgagccgagatagcgccactgcagtccggcctgggtgaaagagcgagactccgtctcaagaaaaaaagaaagaaagaaagaaagaaatgtactcttgaatctgctggacaaattcagtctgtggagtaagttgagaaacctgtctcactgcatagaagtagggagtgggttttgaaaccaaatgttctgatttctaatttgatgctcgcactgcccccagtggaaggagagtgagtgtgtgcatgtgccgcacatgtgcagagtaagctgtgactctgggcgccggcgcaccgctgggccctctgtggcaccactcccagggtgtctggtcctgtttcagctcaattcagaatgtgaacttggggaacatttggggactgaaacccaccaggcccgcccacctacctcactagcattgtactctgtcatcttggtttcctcctcagagtgtctgtctctttttttaaacacacttaacgttgcagcttatgatgctgactttggcagcctgttctgttaatacttgtcctctctaaaccctacagtgccttcttcttggcccctgtctgctgggctgggagcctgtggtccacagccttctccccaccgctccctccctgggaagaaaccggcgttttctttctttctcacacttaactattttcccatccatagcagtctccaccctgaagttattcctactcattgcatttctgtcttggtttgtcaaaccaggatgccatcatgtttgggatttattccaaatgtgctaagtgtgcctcctgatctggtgcctgaatttcacaccacgaaccaggccagtctcctagtcttttgtctgtgcatagccattaggctggctcagggctcctttcctttttgtttcatttactctaatatgcggtttaatttctaatccatggccaaaggcctcaggtgcctgatgtgtcacgcagctttgggctatgatcttcctgttctcaggcaacaccaggccttaggactgaggggcagaaattagctggaggtggtgcgttggtgactcaatggctgtttcaggtacttttcactctggaatccaaatgctgacagaatctcagccaggtggggatggcacagtgccagtatatggcacactaggaaagccaagaagtctttattcactgttcctcaattcattattcactcgaagacttatgagcaatttttttcatgcccttcagagtgtggtccatcttggaatcatccaggggtaattattgtaattgcagattcccgggccctgccccagatctggtgggccagcatctctagaggtaggaggaaggaatctgtattttcagcaagctcccatgtgattctgaggccacgctgaagtttgagaaccactgttctacatcaatgtaattgccaggcagtaagagggtgacatggcacataaatgggagagtactgaagaaaaaggcacacttctgccttcaggctgcaagcctactatgtgaatttccatgaggtcatgcgttattcaatgtttgcctaacataaagtgattgacacacagtgggctctcaggaagtagttaatttatggacttaggtcaagaaggggcaataagtcaggtgcatgggtacatacatatacttgtaacaatagggcaaactaaatatagcgaataattgggagatatacaagcagagatctctgggaggattgaggagagagtggataatttaaagtgaactgctgagcctggcttggtggctcacacctgtagtcccagctacctggaaggctgaggcaggaggatctcttgagtccaggagttcaaggctgcagtgtgctatgattgacctatgaatcataggtcagcctgggcaacatagtgagactccatctctaaaaagaaaataaaataaagtgagcttctggacagcccatgtagaaatgtgaaagctggtgaactcaaggggagcccatgatactggattgtagcctgttggacaaagatgtcagagctcttgataacacatcaaaggcatcatttacccactgggtgcttagatgctactttatatttttaccttcctttagggacaaggctcagaaactgacttgaaagttagtttgcccaacccttttggtgggagggaagggttggatgtactaactttcccttaaccatcctctccttagctggtcctcattccatgcctgttgaaaacaatatgcgtagatttacagacctttgcctgcctccagttccctatgttgcagttagatgtcagctgtttggccacagcgaagcttcagctgcagctttccctgttgattgacatgtgtgccctcaattacacctcagttccctcccaaagagagggaaggattgaacaggatcttttctcctttaaggtgccaggtactaggggccccatttacacttctggagagctcttttaaaagggattcctgagaacctccactcttcactgccttccaccttgagccccattgtctgtccacaagaggaaacaggattttgtgcactgatgaggcagcagagtagtggagtcaattacaaaaaaaaaaaaaaaatatatatatatatatatattgtatttgactgatgagtacagctttggtttatcatctgcactggaatatctttgatgttttgggaaatcacaacactcaaatcagataaagaagccacagtgacaggaccaatgccagaggacctgggatatcttctgacttttgtcccctcagcttctcctagtgccccttttcttgagaagcagtgacccaaggcggggcccttccttgcagtgtgcagtcttcctcaccccaggagctggtgggtgggtcacagcacctgtgatagtcagagaggaccacttgaatttctgttctcctgagggtgccttgcaggtgctcccacccctccctcccactctccccactcaccatccccaagccatggccttcactccgaacccaggacttgtcagctggtatctgtggatgggctttgatggcatccataaattttgttgcaagttttgtttttaaaatatatcttttaactaccacattttcttgaatctaagatgccattgattatatactctatcaaaaattgaataattctgttattaaatttaagcattattaaatgttgggggaaaagctactgctttctatgcattatgtattcatatattctgagttacaaaaccttccactgtaaagaaaggtatattgtagaattgaggaaatagaaaatgaaggaataaaactgattttaaaagccacatgtaatccatgtgttatacaaattttcacacttgaagaccacccacagtcacactggcttaattcttttctttgtggagaccttggagtcaatctccctttgctatctctgcatttatttgagctttgtgtaaatgtggtattgattagaaagcttctagttctgtgttagtctttttaaaagaatcaggccccagcttgtttgcttttataaagtgatgtaagtgatcacactattacctttctgtatgattcaagattttctcaatactgtgaaactaaaataaaatacaaaaataagctggatgccaaagctgattcaagactgcaatagtcatctataaccctggtttcaaatttttatcttccagaaaacaacctcatgttttgagtgatattgaataaatgttctttattatgaatatatttatattaaatatatacaatatatttatgccagaagatgtctcatttttgtaagttttatgcatggatgttctgataaaagttttatttgaaaaaagtgatttctgatgccaaaggtactataacatagtggttaggaatcctggtcttactttactatctatgtgactttggcaacttacttaatctctgtgcctttatttttctatcagtaatgtgaggataattatggtacccacctcactgagttgtagtaagaagtaaggtaacatggataaagcctttgacacatgtctggcacatagcactcatgtgagaaattattagttaaaaagttttgaaaaccatctaggatagacaaagcatcttcttccattggcccactgtataaacctgctcctctcagactggtccttcctgtctctcagtctagccactttacactttccatttgcatcattgccaaccttgagtgtacactcttggaattacctccaaaactctgatgtcgccttctccacagagccttctctgactatccctgagaaattcaaaagagaggagatgcttccctgagccttctcccccagacctaaatgttattagcactccttcccagattctcctgtatcattcatcgtcttctaggtgtttacatcccttttccttattaaatgttctgtctcctggcatcaaccccagtcccctagacatggctaagtattcggtaaatatccactgatggattgatttcacagagtggctgtcggaacccaccaaagatgccatggcttccagactgccaggctgtcgggagatgcagcacaggttctgctctcagagtgagctgctgtccgcagggactatggctgctgcagcctctgcttgtcctgcctcactacagctcagctccctcctccagtgaccggtggggggtggggggtggggaaacaatgaaaagtaggggaaaggtaatttatttcagtgtttacagagggtttgcgtgtaattagcagtttatttctgtgacacagctggcctcctcagcttggaacctgactttgaaatgctcttaaagagacccatacctaggcaatctgaggggtgctggggacttgggaagagagtgaagaaaaatgtcatgccctgtctttggtgatgatgcttgaccaaggacagccactaaagtgaagactcccttgttccttctttccccaactctcccatgcatgcacacacacacacacaaacacacttttgtttcttgagtcatattctgttagtgaatccaccttcgacttagaccttttacaaggtacattttttttaaccttttgttcacatcaaagcttgggctttgatatcttcactggggataggggaacagtcacttgatcccctcctgccataagccccatgattgcaggcaaaacactgttctcctctttgtaagtattgaatagatgaataaataaatgtgcatcagtcttttcatcagtaatatgggggtaatgctgcctgctgtttctaccttgaaagttttatagcaattacatgagaaaaagtatacgaaagtgctttgaaaaagacgttcagccctcactatatgagtgtactatttttatgactttttgctgctgtgagctgtggacttacaaactcaattttgctaagttagcagtttttttgtgcttatgcagagtgggtgtctggttgcttcgggagcatgtaagacaaattatcctaacatattttctgtctcttagcatcagtttgctgtgtttgttctgtgttgtgagcgtgctcaggtcctgtgatcttggttagaaatacagtatttatattttgtacatattgaaaaacatacctatatttggtgcaaaagtggcactttaatagttcttgctaacttgcataaactgtgaataactggtgaaacctatgttgcagttgcttccaaattcaaacatgtttcagaactttttttctttttgaggtggagtcttgctctgtcgcccaggctggagtgcagtggcatgatctcggttcactgcaacctcctccgctcgggttcaagcgattcttctgcctcagccttctgagtagctgggactacaggcacccaccaccacacccagctaatttttgtatttttagtagagacggggtttcaccatattggccaggctggtttcgaactcctgacctcgtgatccccccgcctcagcctcccaaagtgctgggattacaggtgtgagctaccatgcctggccaaggacatcttaacctttgcaagtgttagggtagacctgacattcatctgtggcagtgttcctgaatgagctggggctgagcccatgagagagtctataccagaatagcataatggaaaaataatggcaatgtagtttttcatgaaactaaatttgttcaacttgaaactggatttaaacattgaaaatgttagtgtcctttcctggcaaaataaaaagttaagaacatcattgcgagcatagatatttttgtctttgttttgtgaaaattttgtgatctgtgaaggctaaaaatctatgctgatatatattttatctatgtaatagatataataggtaaatatattaatataattatataatttacttgcaaatgcataatattgctattagcaggttgagttttcttttccattctagtgatactgagatttttatattaattttaagagaaactggtagtcatttatgtaacctgtcattgaagaatgagtattttagaaaaccacataggctggtatagtgaatgccatttctaagaataaagtagtatcaggcattgggttatattcagaagacctgtatttgggccaagtgtttcacctaggctggagtgcagtggcgtgatcttggcttactgcaacctccacctcccaggttcaagtgattcttgtgccttagcctcctgagtagctaggatcacaggcccctgctaccatgccagactaatttttgtattttaatagagacggggtttcgccatgttggccagactggtcttgaactcctgactgcaagtgatccacctgccatggcctcccaaagtgctgggattacagacatgagccaccgcacctggctgcaagttttgtttcttatccattcttcctgactctgccatggtattaggcaagtcacgtgacctcagtgagactcattttcaacttctattaattaggaacaccaattcagtacttagtgcatacaatggctgtaagaattaaagaaaaatgtatgtgtgagagtgctttgtgcatcaagatgtgccttacgaatttaaggtattataaaaatcctttaaagttatgaacattcatgttaggaagatttctattactgagatttacaatacaggtttttcacgtatcatttttaaacatgttttgacagatacagtcaatggtatccctcagaagaaaggtagaacgtatattcaaaatattgttaggatatttctctttcctttgtgctcaaagcatcctgatatcatgaccttttcaagtgttttcttgatatgaaacaaagctgccactgcctgagtagtttgtataaaaacatcagatttctaggtgaagcagaaaagaaagggagtgtggagcttgattccttccccaggggtctctatgatgccatccttgaatgaatgatcaaggcgtgtcccccactgcctctgaaggtacttctcgtggctgccaccagctgccttaacaatttggaaggaaaggcaggcccaaagggcagcaggcacatgcacacccaggtgatcacacctccctcgtcccctgcacacatttaagctcttggcagcacatgttccccaggcacaggcggggctggcgtagtcagcaaggctgccacatctctgtcacaagcttccctttctcctagtgttttcagcaggcctgtatctctccaccatcctccccttcccgggtctcccactctcctctctctgtgacaggttctttttccttggcagattgcactggaatggtgtgacagtccctcagggatcatgccacctgcccaagctggggaggaatagcagagaggcatccgtggctggccaggtcaccaagataacactccccacaggcgagggtatccagggctcctgggactgcagattccattgcctcattgagccaggagccttggtctacgctgtaggacctcagtccacccaggaacactaaacttgcctgcctgccacttggcgctactataggcagctgtacctatcagcacaccatgcctgggaaggtgaccacagagagtaattgccagtgtttagtctgtgtgtgcatgtgggtgacagagcgaaaaggaaggtatggacctctcttttatatccaggttatttattgcatttgtcttacgacttccatttagagctaaataaactgcaaagtaggttatttaaactggatcttgggtgctttagcaagtggagaagtgggcggtgaggagggagaaagatgggagattgggccggggagattgagagaaagaggccaaaagaaacacaacgtggcttattttcctccccttggtagtggaaggcatggtgtgctgtggctcacagacagagatcccctttgctgggggatcttgaagagctttctgtctcaggcttttgggaagcagcctcctgtggacatatcttgcttttacaatttataaataaaaaactaaggcacagcctaggagtgcagattgcacaaagcctacagttacctaccgcacctggaagggtagctccccacttctttgcctgcttgtcacggtcacgtgccccctccacctgcgtcggacttgtgcagcctaatagagggcaggtgtacaaggaagaacgtcgttggggcattttatcgtcaccctgtccaaatgaggtttcagggagtctcatctccagagagtagtcttccacccaccatgtacgtgtgtgtgtgtgtgtgtgtgtgtgtgtgtgtgtgtgtgtacacacacatatttaagctcagatgccctgcaggcccagggagctctttgccaagagactcttggtccatccagatcactcgtgaattctcttttgtacagacttgataaagggtgtttcttgagtaccagaagtactgtagtactgtacataattcataacacgaagcaagataaagtagaaagaacaagaaaagataataactggggaattaaaagtttccaacattgttagaagctgggagagtgagtcagcagtacatatgtccttagggagagctttgcacagggctggttttggggtaggggcctaggtgtccaaaaaaggaggaaggagatgctcaggaggagcagaaatagggatgtggaggagaaggggctgagggcagggagaatgggtgcagattgcaagtgggggtgaattctagctctgccctgcctcctcccctccctttgaaggaaagagatatcatggggccttaatcatctccttatctctcattcctttcctggtttaattaaatttctgttctaatttggaagagcttgcatgttctcgactgctgtggcaaccaatctcttttatgagacccaccctggcactcagaggagtttatcacctccatgggacttggaccctctgtagcttttgccatcatggtcagttctgtagtgagcagaggtggatttgagaggagaaaggggctcccttattattgtcaaagtcatcttgtttacaatggcttcagtctgccccttcctcttcttcaccagggagtgaagcctcttctatccatgtatattttttgtgtttcgcattgtgttacctctcctctcccaggacaaaacacacttcgttgggatctctttgaatgttaaataataccgaaaatacagatgaaagacaggaaacgtggataaacgtaccatcagcattcctcttacacctactgtgtgcccaggcacagtgctgggcactctacacgtgtgactgcctcgaaggtgatggatcggtcctcatttgataaatgaggcactgtattagtccgttttcatgctgctataaagacatacctgagactgggcaatttacaaatggaagaggtttaatttgacttacagttccacatggctggggaggcctcacaatcatggcggaaggcatggaggagcaagtcacattttatgcagatggcagcaggcaaaataagagcttgtacagaaaaactcccattttttaagtaatcagatcttgtgagactcattcactgtcacgagaacagcccaggaaagacctgcccccataattcaatcacctcccaccggcttcctcccacgacacgtgggaactgtgggagttacaattcaagatgagatttgggtggggacacagccaaactatatcaggcgcttaaggcttacagaggttaaaggatcctcccaaggtcatacagctgttaaggtagaaagcccaactggaaccttgtcttgtgagctagaaaagcccaggctgtccccactactccctgttagaggaggacgtgagaggagatggatgaatgatttcggcaattcacttcaacttaacggacataccaaacattggagtgccgaccgattaccagggcccgtgttaggcattggatggtggaagagcttttgctcctgccctcagggagacaagacatgcttgtgttcagtggatgccttgaggaagtgttatggtccctttgagcattatggacccattgctgtggggtataaaggcagtggcggtgttctctctgaggtagccaagaaaggcttcatagagaaaccttgtagacatagaatttcaccagggggagaaggagatcaggacctgggcagaagcgtggtggaggtatgacatttgtgtgccgtgttgaggaagtggccacaataaaggagttggggtggaaaatgcctggagatgagactggggaagagattgggggtgagtgataaaggactgagtgtccattaatgactacagagttccttctatcagggaaatcatctcattacttgaaattatcaatgacttatctgtacatctttttgtctgacactgtccttgttcagtgcccccagggctcaaatgtgggaattagtctaatgaactagagttcatccctttcatgcctcctttggtcttttactgtggcccacatagccctgataatctgtccctggactgctcttctgtcttacttcacgcccttgcctcctccattgactgtgttcccttcaccatgactgctagccgtctaggctctttcctgcttcctggctgtggccacactgtttctgccatttttttttttttaaatttctaaattttgttttaagttcaggggtatatgtgcaggatgtgcatgcaggtttgttacataggtaaacgtatgccatggtgatttgctacacagttcatcccatcacccagataccaagcccagcatccactagctattcttcctgagcctctcccccctccccactcttgccctccgataggccccagtgtgtgttgttcccccctcccatgtgtccatgtgttctcatcatttagctcccacttataagtgagaacatggggcatttggttttccgttcttgtgttagtttgctaaggataacagcctccagctccatccatgtctctgcaaaggacatgatctcattcctttttatggctgcagagtattccatggtgtatatgtaccacatttgctttatccagtctatcattgacgggcatttaggttgattccatgtctttgtattcttcatctggccaatgcctactgatccctcaagcttcatcttaattgttacttccttagagagcactctcctaatcctaatataaattgagtgcttttggtataattttttaaatcacaatcttatttccttcatagcacttatcacctcttgtgtgtgtatttgtgtgaccatttattaagtttctgctctgttaactacactgtaaactctgtaggtgcagggatgtctattatttcatgactattgccagaaccttgcatatcgtgtggcatgtagtaggtgcttagtaaaaaatctggtgatttactggatggatggagtaataaattagtgaatgatataggatcaagctatcagcagggaatattcttatgctcagtgaaaacacaaagcctatgttaaatgaggcaaatttgttggtatttccaattgcatttttttaattcaacaaatatttgttgagcaccgattatagctaggcattgtgctaggagtcagggatatagtgaagaacaagcaaaatcagtccacctggaattcgtattatagtgtgatgatatctattaaacaatttaaaaaataagtgtatactgtcaggtagtgatgagtcatatgaagacaaagcaaaggaaggggcagagagtgttgcagggaggcagtatgcttcagatgaggtggtctgggaaggaggtggtatctgagcagaaatctgcagaagtgggagggaaagccctgggatatctgtggaagagcattccagatggagagccagcaagtgcagggacccaaagtggttgcttggcaggttcagggagtgtccaacaggccagggaggcttgagcactctgaggggcaagaggtcagagagagggtcagggccagatcaggttgggcctcgttgactgtgattaggagtttggattttactccgagtgtgatgggaagtctttgaggtgctttgaacagatgaggtagaagatctgatatatgctgaaagatcactctacctgctgtatggagaactggccatggcagggcaagagtggaggcgggcagctggcagtggtggtgcagcctggaatggctctgctggtggggctgagcagtgattagattgggatgtgttttgaaggtggagctggcaggacttgttaatgggttgaatgtggggtaggagagatgggaagatcaaggagggctcttcagctacattaatctgttaatagcggtgccatctaccaagataggggagccgagagaaggggcaggatggttgagcaaggtcaagagttgagctggaggcatgttaaattggagtggcctaattgatgtctatgagatagcccagttcgagatgtcataagaagtaagtagctggacatctgagtctggagctgggtcagagcaagagatatacacttgagaaacattaatttattaatggtgttttgaatcatgagatggactgatgtcccttagtcttgaagaaggcatagacagagaagaggaccaacgacttagctctgagaaactacaacttaatgtctattagcactgcagtaggtctattactaaggccctgagaacttgatcatcttctcttggggctatttcttctggaattgagcccaaatttagtgttgttgctccttttaggaagttattatgacaggggctactttgccataggggatgaaaataggaattcccactaccaccccatgggctagctgaaggtgcagggcaggtagagattcgggtgtggagggagctcttcagtctgagtctgttctgttttggttcattttccttttgtctgctgttcttctcctgtgaaaattgttttccctcaagctgatgtttttaaagcttaatttttatttctgtaactgtactccttttcattctacaaacctttattgagggcctgccatgtgctagacactgctcagaactgctaagtgctgggatgctccctttccaaacacacggctcctccccgtgattcttttcctgctcaaagccatctgctctctcccacctggtcctcattttattgatggctattacatcatctacctgtccatcatttttcatacctcttatatcattattagatgttctagctaccaagtcttggaaccagtcttcccattttgtcttacaccccacatttaactcatcagtagctcctttggctctatattcaacatttatccagaatctgcctaccaatcctgacctccagcgctgcaccctggtctaagccaccaccatctcttgcctgagttagtgcagtctctccctgattgcatcattaccccacttcagaacatccttatgatcctggcagtgtaaatcagaccatgtccccgctctgcacagaaccctccagtagctcctcttcccttgctgagtaaaagccagagcccttgcaagggtctacagggccctccatgatctgctcttccactcccttctgcttcttgccttaatctgctccagcacagtagccctcttgctgcagatgacatgttgggcatgcttctgccttggatggaaccttgctaacatgggtcttgctggaacattcttcccagttatcagggtgggctcactctttcccgtcctctggtctttactcggtgagttctttcctgaccatcgtatttaaaatcaaacctcctccttcccagtactctcttaactccctttcagatgtatttctctccagagagcttatcactagcgaccacagtatatactttgcctgtttattttgtctattggctaagtgatcccactagagtacaagcttcatgagggcaggacttttgtctcacacactgctgcaaacagttgatgctcaggttagtacctggcagaaggtaagtacagattgagttacttctcattggaaatgcttgggacaagaagtgtttcagatttaggattttttcagattttggaatatttgtatatattttgtatggnnnnnnnnnnnnnnnnnnnnnnnnnnnnnnnnnnnnnnnnnnnnnnnnnnnnnnnnnnnnnnnnnnnnnnnnnnnnnnnnnnnnnnnnnnnnnnnnnnnnnnnnnnnnnnnnnnnnnnnnnnnnnnnnnnnnnnnnnnnnnnnnnnnnnnnnnnnnnnnnnnnnnnnnnnnnnnnnnnnnnnnnnnnctcaacctgtatttaataaatatttgctgaatgaataaatgacagaacatgagttcatgggatgggagggtggtcaatgcactgtatttgttctagttactgttactctcatagtctttgcactaggccctttggtgacaagtgggctgcatttgtgagatggttggatgccattagggacctaagctgtgttctcagaatagcattgccacactagaagccagttggccttagcaagttgaaccatttgctgggatgtccttagtattattaggcaaactgatcatccaaggtttagggttagatgaatccacaaaagagctcattgaggttgtattaataaaaacaaccattcattgagtccacaagatccatacttacgcatgaaaattactctaggatctcttgctgggggataggtgggggatcagaattgccaagggtgtcctcatgaggaggcctccatccagcctcaacaagccttaaacacctcattcaggtgccgtagcaagccttaaacacctctgggtagggtttgaatctgtaaatgaatcagaggtaaatgaatcttaaaacctactggccttaagaattggaaggccccttgcttatatccttggggatatttactgtggtgaaaggatgagggtaaggaatgatagcaaacattcacagagcacatattatatgccaggcgctgttctaagagcgctctgtggatataaacccagttaattttcccaatagccctttgaggtagaaagattatattcccattttacagttgagaaaaccaaggctgcctgtctgcagggtctttgctcttgttgattatgttacaaccatctcaaaagaagtgttgttctagggccatttaggatgatacactgatgtttaatacacttatgtgttacattttgatgtgtggtattgttgtggggagtagctagctgtgtgtggaaacggacttttcatgaggcatgcatgtgtgaacactgtaattagtatttccaagagagaaaagcaaccccctcccccgcccccgccaacaccccaacactgcacctacccggagactttgctcgtgacacatttttttttccccataggagagaatgttaaagtagggccatctcttagatgaaagtcctagaggctttgggacatatgaagactggtcagatgctattgagcatttctcacctttgatcctctgttctgaggaattcttgatagcctaggactaatctatagttctcagaggggccagttgtcttgttgcctcctgttctcgcctccgcctgcctgtctccctggctctgagtctctggtgatatgtactggctcaccgtcaggtgttgggggatggggaggcggctgtgcagctgccgccgagctgctcacttggtaggagaagtgtgccactaagtgaaaatgaggcttggcgactgccctgtgacccactgccctctgtaccttgcccttccctgtgggtggcagagctagacagccattctcatcctggaaacgctggttttaagggagaggccagtcttcttgtgtttgctgcacccatcctgacttggaaggaaggtctttggtgactccatgaatggcacccaggggtccagtcttcaagttccattgctttctctggcctgtggctcatgactaattccaccccaaccttgtctcagactggggtcccactcaccaccagggcgtgagcttttggggaaccctccctgcttgtcagcccttcttttggaggagtaaccaggacccccagaccccacttttagatatccgggttcaatataacacatagaactttcccctcttcttctgggcaagcttgagatggtgtttttcatgaaaagggccagctgagggatcgtttcagagaagcccaggttggctacactttccttaggatgagactgggacatggaaagtgggaggagaaggagcagttgggtttggcccttgcaggcagtattttcctctggactaggagatcctctgcacagtgccaggcctcacactgcatgtaattaggcttctaatgccattttctattgacaagggcaagctgctgccaagtcacttgagatgaaattgggtcacctgtcacaattcctgtgggactgaggtagaactgtgcttactacacactttgccctattttaacctctgactggatctgatcccatatcttagctggaggaggagatgagggaggagcgggggcctctcagagccactctgatcctcatagggtgggaacttggcccggggatgccttgcttaacctagcggggagtttcttaacagaggtcagagtgaatcttttatccctttctaagtccaatttgtaggacatggggaagacagtgaccccaaattcccagtgtgggagacatgagagaggcctcatttgtcactctgagtcaggaggaggaacgggcagttatttgtcttctctcagaaagccacgctgtctagttgatagctcttctctgagaatggaaataaggagagctgtccagagattgagtgagggaggagagggagagaaaagaaagtgcttttgagtgtgtgcatgcatgctcatacattcacgtgcttaacttaggaggcaatttcggaggaaacagagagaaagaaattagaacaagcaggaagagttccaagatgggggagaaaggggcataacatggacaaaagcctgcctaaagaagcagtgaatggaccacatgcaattggggagacagaagcagaagaaaaaggggagggtggggtgggggagaaagcaggtgggggctgggaagttctgcctatgtgcattgtcttccaggtgcttttgtaagcctgagccatgcccaaggcagcactggcagctcaagctcaggccaaacacacacgagaagagtatcgtattgtgtttccttttcttcgtgtttttgaaacaggaataaaaactaccaaaagagaaacacaggaaaaaaaaatagaaagggaaaaaaatctattcaaggaggcatgaagatttaatcaacacccagtgttcttagcaggtcgggagcaagcacaaatcgtattgtctatgcagctatttctgacaccccccagcagccctcagagcaacctctgccactgcccagagtctgggaggcagttcctgggttccagtgtcctgggctattttgggtgggaagaattgctgagccagtcaagggaatggggtacagggtgtgtcatcttcttgaggagcttctcagcatatagagatttccggctttacatggtaggtatttgtccagatggagattttggcattgacatttatcctaatgtgctggatataaacttgggggtaattcgggaatttaaaactcagccatgttaccttcagtacagtatatggatcaatctcttctgctttatctctcagtggcattcaacacggttgctttctctctctttaaaattcatgactttggtgccattacaccgtcctgtttccatccgtctttctggttgcttcttctcctttggggctctcatttattctcactccctctccttctaggagatctttttgaagtctcttgactatacaccaatgagttgaatttctatttccagcccagaactctcttctgagctccagactcatatctaatcagctactgttagcaccgttctaaatacctgagactaccaagccttcaactgagggcttgatccctctgttgttctctttcccacctgcctgtcctagtaaaacagctctaccacctacggagttgcccaagccaaaaacctcacattgtccttctttttccctactccttcaccctcttgttttctgtctgccatcaaacagcaggtcgtatggatgctacctccaaaatatatccccggctgcgcccagtcctccctccccattacatctaccctgacctggccaccatcttctttgcccctgatgactgcagcagcctcttgactgtctttccagctttcttccttatttctcttcaatccattctctactccatggccagaaggatttttaaacaatgcaaatgtcctatgtcacttccctttttataaaaccctttactggattcatttgaaatacagacccaaagctaacatgatccataagacgagtggcctctgccagcctttccagccttgcccttgttttacccatgctggcttgtgtcagaatcagcccccaacccgactccatcaacctcagaacctttggacatgctgtcctgcatgcatgagggtttcttccttcggcggcccctcccatttgggctaattcctacttattgtttccatctcagtgtaaaggacatatcctctggaaaatccactctgatcattgaccctaaacaaagtcagtccctctcagaaatcacactcatgaccctttcaatttttctttggaatacttaccaccattgtaacactccagttgtttttggaatgtttaataccattctacctactaaacctaagctccatgagagcagggccatgtctgtcctgttcactgtggtgtctccaggatatggcaccctggatggtccatcgtagaggttgaataaatgagtgaatctatctcgaacacttttgtgcctagggctttgattcaagcacaaggtgagagtggagcagggtgggatgttctaaaagacagaataaagaattcttgtccttaaggcccctcctacctagtcctgttctgttttgtgttatgattatcagctatgtgtatataaactttcaccaaataaagattgttgctttttgaggattacgtcttaaattttgttgtcacactcactaggtttcatttccttggatgttttatagacatgtatgtacctttcagtccctgtctaggtggatgcaccttcctccccttcccactggtctgtatccttgcgatcccagcgtgtgcggtagcctgaactgcttgagttatgacagcctaagagctgggcgttcctggccatggctcttattctctagaagcttcagcctttctgcaaaatgcgaatgagattattaatggtaataataccttgtctatctttcagggttgttgtgaggaaaagatgagttcatttatgtcaaatactttgaaaactacaaagctccatgagagtgttggaattaagtaaggatgctggggagtgacgagagatgagcaattgctcttaactacagagaagaaagtttcctgcaggaggtggagattaggaatgaggctggaaagatggtgtttcaggcagcatcctggcaggaaatggaaggcaacttcagctgggttttgaagagggtttagtaatggtaccatttcagggatgtggacaggaatatgggactgagaagccatacttagaccctggggattagctattgtgggatgtcatttctagtcctgggcctgaaggagcaaggtgaggaaatgaggttgttagagcctggtgaggaaggaagaggggctgcctgaccgtgaccacagagggacctcaacctgcctgaattgccacactgatgcttctggtgccacctcttagaaactagagggctagggagctgggtgatgcagtttgtagggcctcacatctcagggcacagagaagggtggaaagtaggtgagggaggggcaggtaagtggagaataaccagtgtggatgggtattatttgggaagacagggaggagcgaggaacgatgaggatatccaggtaaggatagtgatgggagaaaaagcagaaaggctggagaatacctatggagcagttgaagaaattagtgggaaataggatttaagaagttggcaggaatgaccaaaccatgattgtcaggcttggaagactgggctttatcctgcagacaaggggggctacagcagttgtttccacagaggagatccattatgaaaagtgtctggagaaatggtttgggcagaggtatgtgagtagagggaggcaaggaatgaccagaacactgttgtgaccaccggtgagaatggagagcgctgggtgaacacaagaaccattgggaatggatgagactgaatgcaagggcatgtctacaggagaccccagggcacagagaagccccaagcctggcatttctgagcaggattgctttgctcgatgccaccttctccctctcctctattctagtcatgtgccagggctttgtgacccgtgcttttctgttcttttccttgggacatctctgctactgtcactgctgcctcttcccttatttctgaaggtttcttccacatttctccttattgattgtatattattactgcaactcatgaatgaccgtcagaggtttctgagcctacagggctggggcaggggtgtctcctgaccatttcaatcttctgccacagcctggaccacacagacagctttagcatcagaagagatggccacacccagagctgggcccccagtatccacaaaggaaagttcagcttaggaagaagaaatggggagagaacatttttcttccttagcacctgaatgaatgctttgcccagcagggctacctcccgccagtctctacctttgttgtaatgccaattcttatttaatgtctgccaaacacaaaaggtccatcaggatcacgtggaaagaaagtgaaatgctggcggtgccccctgggtgtaggcctgaaataagatgaacaggaaataaaacataactgcagggaaggcgggccctagacaaagaatggcagtgggcttgcttgttcctcctctttgctcccttcctttcaagcctcttgctttgagagggagaggcttgtgtgtgttttgtatgggttggtagtgtgagaaggaagtcaagatgtttgggaaggatgaattttgagggaggatgttaaacagaagaacagccaagtatggggaaggattgggaataatggccctaaatgtggcagagtagaaagagaaggaaaagaacagagtgaaaaggcacaccggtttcagtgtggcagaaggagctcaaacacagggtggggagttgatgagggctttgcttggctatttgtgtgcaagttatgagaaaattgctaataaaccaatgcaaatcatcatttattcatgtcattaagcactatgtttagctccttcgtgcattatcttattctcacagcagttgtgtgagctagaactctattttctatgatttgcctagatttgtagatgactaaactaaggctgaacatgagtaacttgcccatacagctgacaagcagtacgctggatctgaaactcaagtgggcaaaaccaggatggtcaagggagtgttccttctggacatagctcctaggcattaactcccagcatattggctggagttagagaagtattgccaggacagagcacatctccatcttcctctgtctccccatcccatgtcttgttatccagttttgtggcccctggacaccaacacagtattcattggatggtgaagaacggtgggaaaagcctggtccatttggtgtgcacaaagcatcttcctgacctcttactgtaaaagccatgacagtttgctccctatgttgtacaagagaaaggataaaagccttttgcctccagtgttacagagagagtctgtagactgggcatacttcctgaaggcaagtcttttcacagtccctgcacataagtaccaattagataatttttccagccatttcctcattcccatcccaataataaaccaataatctaaacatactaaggttgagaacgctcctcccaaatatcttgggtaattggatgatctacagaacgtatatgaggacttgttgggtgatgcccaagtgctatgtctttgtctgcagcactttctactttgcgtggtctataaaagacagctacagaatacagtgtggtctgtctttggctttgaagttggacatgctgaatattattaattattccttgcaatacagcaaaaagttctgatccaaacattgtttcttatgcttaagtttgttgaaaaatttgaaatcaggccttgtgaatttgatcatctaaggtcttatttgcagagacatgtacttactcaggtagtaatgtcaatagagatgtcctgaggctcaagaaatccctgtttgcattgtggtgagctcctcagccacattggagcatcttgggtggttccaatgaggacttttgaggaccagctcagccccatgcacaacagcatgcagttttgctctaatataaataaaaacaatggaagtagctatttttattggacttttactattataatatgtgctaggcactatgtagagggcttaagttcattatttccaactcttacaactttgcaatctaacattactacaatttttttttcttaagatggggaaacagaagagttaataactcaccaaagtcacagctcagtccatgatcttagcctctaccagttctgaaagacatgcctcctgctgtgtagtagttccaacagggcatggttctgatactaatccatttccatgattatgaacaagcaaggccttggcaaaattgtgagatagtaaggcatgccttctagctgccagcccttttgtcctttcccttagaacctttcgtaaaattctccacccccatcaccaccatcaacacacttctacctctcactgtctccactagcaaattcttttccccattgattccttcattcatttcgtcaactgatctttattgcatgctgactatgtgctaggtaccatggtgggcactgctctaaggaaagattctaatttcagttacttccatttttgcttgatttttaagtcagtgtttttttttttttctcagaagcaattcattctgagtgcttacctctaatcagagaatgaaaaaccttgtcaattatcaaaagaatgtgagacattagcaggcagatggtgggttttgggcaggtgcacctctactgtcaagacagttgccattcttcctcaaggataagatagacctgaggtacacagaagtgagttcatgcatgatgtggatctacctccagaggccctatcccactagataatttgtagattcaataggggaagggtgcttcctgacttagaaagcagatctcagcctctgaccctatccttgcactgtggctgagttatgtttactgccatagttactatagtgtatttaaagctataatattgaaagaccctatggttggcagatttcttcttgggcaacaggcttatgttacagttcttagataaagaccacttgtatatgatcattctagtatgcaaccaactctctgtgatcatctctgatgaaattctagttgagaataaacttttcccttgatacatacagaaggcaaaaaagatattctctaaaaaaacacgcaagagaagatttccatctgaaggccaatgcaccaatgcacctaagagcagagactgtcaagtcaccctacagagtcttcctgtcccaggagaaaacacgacacttgagattaccatacccaaaaaaggatgaccctctcatggcctggccacctatggaagcaagggaaagagcaccagaggaaagaataggtaggacccatcccaacatctgtagggaagagggagctccgtccaagggctggactttcaggtctctctggaggggagcaggctgaaccatgctactgcagcctaatgccactgactatctcagtcacgtgatgcactctccttgctctgatccatcttccaatcacaaattgacttcccaggaggcttgcctgtgagagggtgatgggtttacctgagctcatgtgggccctggtctttgcaaggttttatttttcattggaatgctcaggtgtagtgagttcgacctgagaaacaatcaactgtcagggctgatcaatcaggtttgtgagcaactgacattgagggctggactctggagtagatagagtttactcaggaaagcctctcactagaggcttcctgggagaatgctgtctggcctgtaggcaatagtccttgatgccattccttttccagtttggtgatacttgactctgagttttctttaaggcagctgggacagttccatggagggtagactcatgcacagagatatcatattcataacggctctttgctatacagctactgcaatctacaatcccacacaagataccccctccttcagtttttgagtacacatataactgtcaggttgactgaataagtttgcctatcctgaggtcataaagacagtctcctgttttattttctagaagttttattggtttatttttcacatttagtttccaatccacctggaattgatttttatgtgtgttgtgagcaggagttaagatttatttttttatgtggacatccaattgacctagcactatttattacaagtttttattttctctgttactgtctgtcacctttatcataaccatatcctgaccacgtgtgtatgagtttgcttccggactctgttctattccattgtatctctttgtatcaaataccacacagtttcttaataactgtagctttataataaaagtcatgtggtgatgtaatttttctaaatttgttctctattttcaggtttgtcttggttattttgttttcttctcagcatttatgtatacatttagcctttaaaaaacatgagggctaggagtgctgaccacctcctgggcaaaaatccacatataacttttgagaccccccaaacttaactactaatagcctactatgggctggaagcgttactgataacgtaagctgtccattaatacatattttatataatatatgtgttatatactgtattcttaagatagctagagaaaagaaaatcataaggaagagaacatatttactatgattaagcctaagtggatcatcataaaagtcttcattctcttcattttcacattgagtaggctgaggaggaggaggttcttgttgtccaggccttcttattgtacaaccaaaagactggcagctggtgtttatcttttcccttcaaggcttgggggttagcaactttatgggtactttatcaggaaggtcctgatcataaacctaactgcatttgcacaaaacagtagagttagcctattccttccagccttaaatcctggtgctcacttctctcccttactaataaatgtcctttgtggcatatttttttcccaaaatagggcactttgtctgcattaaaaccacttaaggtagacatctttcctcctcgatgatgttttttcactggtgcctgggaactcctctgctgcctcttggttggtagcagctgcttctcctgttagcttgacatttttttaagccaaatatctttctaaaattatcaaaccatcctttgctggcattaaagtctccagctttagataattcacattccttttcctttgtcatataatgacttcaatttttttcaaatcaaattagtctataggtatgccttgcttatagcaatcctgcacccatgtaaaagctgcatttttaatatgagataaaaagatatttcacaaaaagtataatgtttttgtacctgctgacgtagctgctacaactacttcgcaattttcttttcttttcttttttttcttttttacaatgatccacatgttggattcatttgtcttgaaatagcaggtagccacagctgtaggcctcaatttatggcaaatatcaagcaatttaactttttcttatactgtcatgacctttctctacttcttgggaacacttccagcatcactagtagtgacatttcttatgggccccatgatgttattcaaggtttacagtattgctctaaacacagtgaaaactatgcaagaaccatgagagatcactttttactacagcatgcaatttactggagacaattgctcactcagagatgattattgtcacatggtgtttgaagcagatacttgcaacacttgagctcattgcaatagcaacaggaggtggctacaaaaatataggcagtagtacagttacacatgcagttaattttatgcagttatgctttatactgcatctctacatttgtttacatttctcttaactaaatggtatcatgtacagtctgtaaatgtgtggataagttttgatacattttaactttttataatctgtatattttatggtagtaaatgatatagattaatatctacatatattttgtgcattcatgacatacctaactttgatatttctaggttacacagttctgtaagttttttcaaattgttgcaaacgtccaaattttttttccaatatatttattgaaaataatctgcatataagtggacccatgcagttcaaacatgtgttgttcaaggatcagttgtatgtactttagaattatcctgtcaatttttactaaaaaaactcttgctagggttttgattgggactgcattgaatctatagaatattggggagaattgacatctttataataatattgagttttctcattcatgcaggtaatatagtcatccattcattatatactttttctcattaaagttttatactattttgtgtagaggtctgatatatcttttattttattctattttttgagatggagtctcactctgtcacccaggctggagtgcagtggtgcgatctcggctcactgcaacctctgcctcccgggttcgagcaattctctgtctcagcctctggagtagctgggattacaggcacctgccaccacgcctggctaatttttgtatttttagtcgagatgtggtttcaccatcttggccaggctggtcttgaactcctgagctcatgatctgctcgcctcggcctcctaaagtgctgggattacaggtgtgagccaccatgcctggctgatatatcttttattaaactcattttgatgctatcataattggcattatttttaaagttctgttttctagtttttgttgccagtatataaatatacacattaatttagccatattcagctatcttgataaattcacttaccaattttagtagtgtatctgaagattcttttggattttctatatatataatcctgtcatctgtgaataatggtagtttaatttttcattttcaattcttattccctttttatttctcttatcttattatactggctaggaccttgttataaattaaatagaagtggcaataatggaattcttatctcattcacagtctcaatggaaaagtttcactgttttctcattaaacatgatctttgctgtaggttttttatagacaccctttttaggactaagaaagtttccttctattcctaatttgttaggtgtttttaataaacacaagttgaactttactaaattttttttctgcagctattgcactgatcatgattttcctcctatattcttttaatatagtgaatcacattgatttttcattgcaaccttggagtgacatcacctttgttgtgatatgttttttctatatcattgggtttgattttttacgattgcattatctgttttcacaatagaaactggcctataatttgcttttcttgcaatgctcttgtgaagttttgatattaaggttaggtttccttaatgaaacaagctagatatgctgtctttttctactctttggaagattttgtaagattgaagtattttcttccttagagttcacccatggagatatctgggcttggaggttttttgtttgtttgtttgttttgttttgttttttttgttttttattgtggtttctaccaagttgtaatttaacacagtggagaatcaatctgttatttaccatgttgaaagaataggctggggacagtggctcactcctataatcccagcactttgggagcccaaggtgggtggatcatgaggtcgagattgagaccatcctggccaacatggtgaaaccccatctctactaaaaaaattacgaaaattagctgggtgtggtggtgcacacccgtagtcccagctactcgggaggctgaggcaggagaattgcctgaactggggaggcagaggttgcagtgagctgagatcgcaccactgctctccagcctggtgacagagcaagactccatctcaaaaaaacaaaacaaaacaaacaaacaaaaaaaaaggaggtggggggaatcatggaatcaatgcagaaaaaaatttaatgaggttcaaactttctttgttttgtcttttttatgtctcttataagttacagatttaatttctttgaaagagaaccattaagcttttctacttcttgtgtcaattactgtaagttattttttgaagtaatttatccattgcattcttattttcaaatttagttgcataaagctcataatgtctccttattatcttttaaaacattcataggatctgtagtgatgtccttttttcattcctgatggtgataatctctgctttctccctcttatttatttatatctattagtcttgctagaagtttatcaaattcattagtcttctcaaagaaccaatttttggttttgttgatttttctggattgtaaatttatttttgtttttatttatgttctttatttccttctaaatttgaggggtttaatatgctgttctgtttcaaacttttccatgcatatctttatatttaaggtgtatttcttatgagcagcattttttttttttcctagtgggagttgttagtgtgtgttttgctcatcatggtattttgtacctggaatagtagctggaacatcctaagtcttccgccagaaaatattgaatgaacgagagaatgagcactgaggtctttgtcaagggtggaaggtgggacagagatcatcaggaatctgagtttgtcctgcaacaagtgaatcggtgcaactcccttgaggacttttgttctctgtgtattccctatctgacgatgatttagccagtcttcatgcttatctgtttcatgccaatccccctatcaagaacttctgctttccttcttcccacctccatcactcacaattatagcagtgaggggtgccacaagcttaagtatatagcatgttctttgccaacattcccaacaacccctccttttcaatgttctctcacagaaagattgcctcccacacctctcttcattacaaaagagcccaaatgactcctggtattttaaggggcgcaaagttatgacagtgacagagcgatgtggtattagcaaaatgactccgttggatgtgccattagggctttgcatgtcatctgggtgactgctgttttgtccacatttagctgggtgagccccagagctgaaggagtttattttcggtgtaggaagaaaagctttttggatttgcctgtcggttccttttatttttttcaaagactccaaagttgatatggctttttccccctgccttgcttcagaggcccaaagatgtagacaatgagtctctgcatgacatttaattcgcctacggtgctgttttgaatgttacagatgaaccaactatgaattggctgtatgtctgtatttatatgaatatgtgagacaaggggactagatgaactagagagaagcattcttgggaagaataagaagacaccagcgaagagatggtggtgggcatggcagatgagagtcacagtggtagaggggacttcaagagatcatctgggctgggcgtggtgactcatgcctataatcccagcactttgggaggccaaggcaggtggatcacttgaggtcaggagtgtgagaccagcctggccaacatggtgaaagcttgtctctactaaaaaatacaaaattagctgggcatggtggtgcatgcctgtaatcctggtcactcgggaggctgaggcaggagaattgcttgaacctgggaggtggaggtttcagtgagccaagatcgtgccactgcactccagcctgggtgacagagcaagactccatctcaaaaagaaagaaaaaagaaaccatctggttgagtcctttgtccttcagtagatgaagtgtcctcatccatattttatagacaatacaattgaaatccagagatgtttcattatttgaagaagaagttggaatctgattctgctagcctgtgaatttcaaaggtcaaagactatattgacgttgatcactgttgtattcccagcacctaattcagtgagtagtacagggtaggtgctcaataaatatttgctgagtaaacaccaaatatatacctacagctgctgaaaattcatttatgttacactttaagttgttctccagagcatctggttaatctggctctaaagtactacaaaaattatcagtttttaaattcatagatacatgataacaagtaaaataaatggatttcagtttattagatgagggttcattcatataacaaatttttgttgagtatcaatattatatacaaagcactggtctaaatactggggatacatcagggaacaaaacaatccaaatccctgccctcatggaacttacattgtttacagtgtaaaaataaaacagataaatcatatacatagtgcattagatggtgatacagtacaaggggacggggtcggttttggtaggagggcctgatggtgtacttttatatggggtagttaggaaaggcctcacagagaagttgacttttgaataaagacctgaagaaagctagggattaagccatatggacatctggggaacaagcattttgagaaagaacagcaagtgtgaaggccctgaggaaggagggtgtctagagaggtcagggaggagctaggagaaccatatggatggagcttatcaactaggggagccaggtcaggtagaatcctgtaggtcatgatgagactttgactttaacttggggtgagttaggaagcctttggagagcttcaaagaggtcagtgacatgattcagcttacatttgaatagggtcaccctagctgctttgttgggaatggactgaaagggggcaaagatggaagtaaggagaccagttaggaggcaattgcaataatatgagtgagagatgatggtggcttagcccagagggtagcagtatgaatggtgaggaggagtgaaattctggataggttttgaaggaaggaaaggctgatggatttattgatgaacctgacatgggatatgcgagacaaagggggagggtcatgattatttgaaggcttttggcttgagcagctggtaggatggcattgtaattaactaagctgtggagaatggtgagaagagcaggtctgtgttttattggggaggggggaaggatcaggaactcaggtttaaacgtgaagttggaggtggctactagacatccatagaggatcttttgtaggcaggtagaaaaatgacttgaattcagagaagtttgtggtgaaaaaatacatatatatctgcattattgtagtatatagtttttaagaccatgagaattaggtgtgaataaagctgatgtcatgagttttattagtatatggccaagatagggttttctattatattctgggggtcaactgattagcttcagggctactaatccaagatagccatgtagagcaagtatgtgttaactctacaggtgagctggtgagggaagggggtggatcagcttaagccagcctcactgccaggaaagcagccttgggtgttgagtcagctctgctatcatcctttctgtgaaggggaagacatcctgattgctattatagatatgaagataaactcacctggataatgtcatttcaccatgtaggcactcctcatccacatgttgagacatgggcatacacgtgcaattgaattcatttcttgtttttcttgtgatacattcacctcaaggtgagacttaggtagagttgaccaatgggctggagatcatgtgctgaggaaaccctgagaacacagctgctctcaacttgtcataaggtgtttctttccaaggagccccaaatggattgtgctatactcatggcattatggttggtaatggaggtgcaaagaagtagaagacttggagagttcccttaaggaacttatctggtggacttacatgaaaattcaaatagtaatgcaagatggaaggtgccagacaacagaggcatgaaatagttcatatgagtcatgagaaattctgagtgaaatcctaggtgccataaagtcaggaaaggctcattcacataggagattgggcttgagctgacctttgaggagtgggaagacttaaataagtaaagaggaagagggcttcctagtgtggttgtgcaggttgtacataaacaactctaaacagcaccataaatgtcacaatccatgtgtatggccccaagatggaaagacactccaggagggaaaaaaagcatggaaaaaaacaaggagatagagttacataatacatggaaagtttatttggctgatgctagtcaaatatccatctacttatttaggaaatatttatcgtctggcatcattgagatcacactgaacagagtggaagattcatttaggaaagcagtgacaaaaatgtgtgggctgttgctattcaatgtgaggccttgaatgtcaaaccaaggacttaggactttgccccatgggcaatcaggaggtatagaaggttttggatgagaggttgatgttttaaaaatagtgttctagaaggatatcttggcaacaatgtgccagatggcttgggttatggggtgacttgtggtggggaagtgaaggaaaaccataaaccaggaaaagagtggagagtgttaaaggtaattcagtatgggttaacagaaagacatggagtcattttcaaacatacagagtcgactgtacattcaccaattaggtgcttggtaaatgcttactatgtccgtggttctctaatacatgtaaaagggagacagaaaaaaattcaacagtaataatcccaggtatatctgtgaatataaaacacatatccacattgcaagtcagcctgtcaataagggaggacagaacatagataagcagaatgagatatagtgaataaatttaataactgccaactagttagcatttatggagctccttaatggcttaaagcatgactgtatcacatgagttttttttactacaaccctatgaaattagtgttatcagccatctttcaatttcaatgaggaaaccaagatgccgagagactgagtgacctattgtgctacctagccttgcactgtgccaagctcagtatctctacaatacataggtaggggaacctctagttactgagccagctttgtcagctgtggcgagggtcatacctgatgcagccatgagtgcatcccttcctcaaggggcatacaagaccctgccgagctaagacatccagtatggggtctttgtcactgccaagaatgcccctggccataataactgtccttgagtagcaagaatagcagagtccctactccctgctcctggatgagttaggtcaacagggactccaccaactctccatggcactggtccatcagagctgcctcatgcctatttccatgcctaggttatgctgtaggaagcattggcatatccaaggctagatctttcatttccttcccctgcgagtcttctgtaattgcttggaactctgggaagtccagcttttggcttagtagagggctgttctttcactgagtcagggccctttcatgatggaacctcttctgattatgaaggtaatgttagagtagttggtgggtatatttgctagggctgccataacaaaacaccacagactactggcttaaacagaaatttactttctcatagttctggaggctgggagtcctagagccaaggtgttggcaggtttgttttgtcctgagcctctctccttggcttgcagatggcccccttcttgctgtgtcctcccatgttctttttctgtgtgcatgcatcttttgtgtacaagtttacttttcttgtaataataccagtaaggttggattagggcccaccctattgacctgatttttaaaccacatcacctctttaaaaggccctgtctccaaatatagtgggagttatggccttggggtgaattttggtgggagacacaattccgatcataatcctggggaagctcttcccactccacatttcattgtcctgttgtccttgctctcctaattctacttcccttccctcaccttttctggaagtctatttgagcctggatccagaagatgcaagggagagatctgaagtgttgcttaaaaaaaccgcgacagcccacttatgcttaggagctttttctgggcacctttcagcagcaacacaccctcacagttggacttcctgtggtgaaggaaattttctaatttcttttattaggctaattaggaaaagaaaaacaatcattttttctcaaatcagatactataactgggacacaatgattattaatcatcatcagctgcaattgaagtccatttggtcattcaacaaacattccccaaccccattcccacctttccaattatgcaacccctcagttaaaatcgccatctccagaaggctctccctaactaatttggcccacaatggtaaaccccttttcaaaatttgtgtaacatttgacatctgtattacttatttggtatgtattatagtgtaccttaaaatctttaatgtacacatatacataacaaaataagttccttaaggacaaaagaccacactttatataatttttgtttgctggaatttaacagagagtaggcacagaaaaagttctcaaatgtttgctgaatgattaaatgattaaataatttgaggatgggtattttttgggcccataaatttagaaattactgttaaataacattatatagatttcgtagattacaaattttgaaaaaattgaacagcaataaaatacattttaaattcaaacaacatatggacataccttggagatattgcaggtttgatttcagaccactgcaataaagtgaatgacaataaagtaaatcacacaaatttttgtttcccagtgcatataaaagttatgtttacactatattgtagtctattaagtgtgcaataacatcgtgtcaaaaaaacatatctacataccttaaataagaaatatattgctaacaatcatctgagccttcagaaagtcttaatctttagctagtggagggtcttgcctcaatgttgatggctgttgactgatctgagtagtggttgctgaaggttgggatgactgtggcagtgtcttaaaacgtcttagtgtgtttttcttgctataaaagaatacctgaggctggatattttataaagaaaagctttttatttgccatacagttctgcaatctatacaagaagcatggcattggcgtctgcctctggtgagggcgtcaagctgctcccactcatggtggaaggcgaaggggagcctgccacatggtgagagcaggaagcaagagagtggggagggaggtaccaggctcttaaaaattctagacagaactaatagagcaagaatggagaactcatcatcattaggatggcaccaggcatcaagctattcatgggagatccactcccatgacccagacacctcccattaggccccaccttcaaccctagagatccaatttcaacatgagatttggagggtcaaatttccaaactatagcaataagagaagaatgatgcttgctgcagccattgactctttcgtgaaagatttctctatagcatgtaatgctgtttggtagcattttaccaacagtagaactttttttgaaactgaagtcaatcctctcaaaccctgctgctcttctatcaactaagtttatgtaattttctaaattttttgttgtcatttcaacaacattcacagcatctttacaggagtagatttcatctcaaaaagtaaaaagcaactcctcatcaatgaaaattttatcatgagattgcagcaattcagtcacatcttcaggctttatttctatttttagttctcttgctgttttcaccccatctgcagttacttcctccactgaagtcttgaaccccctcaaagtcattcatgagggttggagtcaactttgttcaaatgtctgttaatattgatatttttaccacttcccatgaatcatgaatgttcttaatggcatctagaatggtgaatcctattcagaaagttttctgtttactttgcctagatccattagaggaatcactatggcagctatagccttatgaagtacatttcttaagtaataagacttgaaagttgaaattgctccttaatccatgggctacagaatggatgctgtgttatcaggcatgaaaacaacattaatttccttgtgcatgttcatgagagctcttggatgaccaagtgcattatcagtattttgaaaggaatctttttttttttttttttttgagaagcagatctcaacagtgggcttaaaatattaaggaaaccatgctgtaaacagatgttctgtcatccaggctttgttgtttcatttatagagcacaagcagagtagatttaacataactcctaagggccctaggatttttggaatggccaatgaacattggctttaacttaaagtcaccagttgcattaacctcctaacaagagagttagcctgttctttgagtctttgaagccaaacgtcgtcttctctacttacaattttctcgtctctagttatgaaagtcctagatggcagcttcttgcaatatgaagctgtttcatctacattgaaaatctgttgtttagtgtacccgtctttatcaattatcttaatcttctggaaaccttgctgtaacttctgtatctgcacttgctacttcaccttgcactttcatgtatggaaacggcttctttccttcaacctcgtggaccaagctctgctagtttccaacttctgcagctttctcacctttattagccttcacagaattgaggagacttaggttcttgctctggattaggctttggcttaaagggatgttgtgactggtttgatcttccatccagaccactcagacgttctctgtatcagcaaaaggttatttagctttcttattcatgtgttcactggagttgcacttttaatttccttcgacaactttttcttgcactcacaatttggccatttggtgtaagaggcttagtttttagtctatctcagccttcgccatgccttcctcactaagcttaatcatttctagcttttgatttaaagtcagagaagtgtgactcttcctttcacttgaacacttagaggccattttagggttattaactggcccaatttcaatattgttgtgtctcaggggatagggaggccaaaaaagagggacagaaatgggggaatgaatggcaggtcaatggtgcagtcataacacacaacatttatcaattaagcataccaacttacataaacatgacttatggtaccccacaacaattataatagtaacgtcaaagattgctgatcacaaatcaccatgacagatataataataatgaaaaattttgaaatattgcaagaattatcaaaatgtgacacagaaacacgaagcgagcatgtgctgttggaaaaatagcatccatagtcttattagactcagggttgtaaaaaatgcaacatttgtgaagtgcagtaaagtacaataaaacgaagtgcagtaaagtacagtaaaatgaggtatgcctgtagaactaatctcgtgtcttagatgtgtgaaaaaaagaaaagaacactaaagccaggttagagagttctgctttctgctgtgcctttcatggacttttgaaccttgggaagttactcagcctctctcagggcctttcaccatttacaaggtgaggccatggactctcagatgacaactagatttaccttgcatgcagttttcagtgtatggacatggtttactggagaaagattctgagaccatgtccaaacccatctatgaaaagtacctggaattgttagtcatgtcagcaaatgcagaggaggaagtataggtagtgtaagtatagacgttctctgaggtccctccgagcagtaaagctctatgaatttatgattcactttctctttcatgaagagaaagcacttcagaaacttatggggctctgtagtcatcaccaagaacatttgctttcattgtactgttaagtaggagtgctcatcagcagagattctggtcaaccaaatgctgggttagtgtagagtatgctacttgatctaaattcaggaaaacatgcccagggcgtaggacttccatactacacaaattttcttaattgcattggtgtaaaatgtgcaattaaaagggtaatgagagtggttatctctaggtaatgattgtgggtaatttttgttttcccgtttatgcttttctgtacttctaaatgttcatatataacttttatagttagaagaaacaaatcctataaaaaagaatgatagatactctagcaagatgaaagaacaaggaagaatttcaaaattcagttcatttcagtgaacatttatccatttcattcaataaatatttatttaccacttacaatgttacaggtactgcaggggttaccagtaactgattcaagaaggagagctgttcacagagcaagatgtttcacagaagggaaagctattgaactaggtcttataggaagagttatcaattgacagaatatgaaaatggggcatcttgggaagaggaaatggtacctgtatctggaaaatgtaatgcattatcaaaggaccgtgaatgtttctgagagggatcctccttaggagtggggggagataaggctcggtaaatggatgaggcccagactgttgtgtcatggtgtctaactagtgggcaaagtagagccactgcagggttctaagcagaggaaggccaccatgagaacagtgtgttgggaacactgatgttggcttcaggagggtcagagggaattcactgggcagcacagtggttcagggtaagggaatgctgtataagcaccaggcttcttcccaggtgttcttaattattacaaattaggaagattaaggtttaaattgtgtcactaacatgcttattcagtgggtgaggctacaggttgctaaacttgttagaattgtgatacaataatctcattgttttagtgtcatgtcttttccacccacctctgctttctctttctaaccgtctcccaccccatgttattggcatttagttcatattcattttagtattaaagtgaagtaattatttctgtattgtgaaattggcatttgagatcattggaaatattctttaatgctgtaagctagagttttaaaaaataggattagttaagtcatattttttaaaagcgaaaaaaattacccagaagctattgaagatgatgagataatgagatgaagaagttgagatggactgtgtgtctcttgagtcaatgtcgataacctttggaacctgtcctaagtgagaacctcgattgccctactgcaaatgcacgtgttcagctgctgattcaggactgatcactgggggtgcctcagaactttccattttcttagattcgtcagcaaactcacactcagggaccttatgagaccaagtcagagtaaatgtccagggtttacagagtggatacagtggctctgtttctcaagaaggactctgtataattaaattatcattcttctattaaaaaattgaaattctttctcccaggagctcattgccagtgccttctctgtagtcttatagtcaattcaaaaatatatcacttctggaagatgtgagcttgaagtgtgaatgctatcacatgaatcttctttttatcatagaaaaggcttttaggtggggtgttgatgtcaagattaactcagagaaaattggctgcagttagggctgaatgatagtgatcattccaaaactcattaggagtctaaaaagtgaatatttagactttgaccaaaacccatttgtcctagagtgaaatatggtagcgagagaaagacagccctgcaaccccgaagtgtaggcgggcctttctttaggaaccaggcatgttcttgaaatcttgtgtgtcaatcagctttttgtaaatggaatccttttttctccttcattaactttccctgtaatttcagcagtgtttaacattcattactgattgatcttgagttggcagttaactgctaacattcagatttggattttagtgcttctttcttgattttcttgcctttttttctttgctcactttctttcagcaactacttaaggagtaaatactatgtctcaggcccagtgatagggactgggaatataagtaagaatgacaggtaaacaattaccgtaggaaatggtaaatgcaaatcctaggagtacagagaagctgtggtagcacggagtccctctgtctggggagggcttcccagggcaggggttactgaaggatctgaagatgtgaggaggtgcttgcttgggtgatgcccatccaaggaagaccaggatcagaggcaggtttgggattaactaactggaaggactttggtgttgaggagtttcagtctcaggacaagcagtgaagcagctgatgatctttgcttagccttctacatggagtgagttgtggggaaaagttgtttgcaacatgtatttctctaatggccagggaggggttatttcactattatttctctccaacttttctatcaaatacacttgtggagtttctgtagtgtgaattgtcttacttcaatctgtaagttcaatctatattcatgaagtaggagggcacccctaaataagattgagagggaaaaaacatgaatattttcagttttagtgggaactctcatatttgacttagtaacattaaaaatgattatatataaattacaaattttttatggtaaaggacaccataagtaatgtcaacaaatgattaatacactgagaaaaatgacacgtaaaaaaaattctaatataagtatatataaagagcctctataaatttataagaaaaagacaacatatagaaatatggacaaaggaagagagtaagcgattcaaaggaaaggcaaaccatatggccaataaacacctgaaatgatgctaaaactcagaaaaatgcaaattaaagcaataaatcggaccaattctttatccatcagattggctaacatgagtaggaagattagtggaatgttgcctacctgtggttctgtgcatctgtgtgggtctactttaatgagtttagatctaggtgcttgtcctggaggcacattcacagtgtgttttttaaataagaaaagcaagttacagagtaatgtgtatagtatgatcccattcaaaaaaatagcaaaatgctatgtgtaagtttgaatgtgcatgaagataggtgggaagaaaacacatcgggccataagcacttaccacagcaggatgggaatggggggagggtgggggcaagtaactttttctatatacatctttgtatgcagttgtatacatattgcctttgtaatttaatgtacaaagacaaaataagtacctagaaattaagaacagattagtacactttttctgctactgtcttgccatagtgttgttcaaaccagctagaaaacaattctgtggtgccaggtgagatgaactctccacctcttcctgagggctttgtcttcatgcatgggacaaagcagtgtaattaacatgcccccccaccccgccttaaaacctaatattcattcatctcttactttggttattatttaaaaagaaaacatttgtcaattacttcacactgacaagcaccatcccactgagggggcaggcaggaggtccatctcaccacccagctgtattgcaacaacgccctctccatctgggaatacggcccaggcactcctctggaatcctgaacacactccaggcacctctcttcttactgaacaccacctatgcttggagcaccatgtgagaggacacctctggtatcaggcagcttcagatgtattcagagagattgaaaactgcaaggattcaaggcataacaaatgatacacagacaagaaaaaaagacatttagagtgggggatagggcctgaaggcttgaatggtcctacaagactttctcaaaagtcgtcaccctgggacctgaaacattagagctctttccagagtaagtctattctcggccagaggtctccaacagaggctgtccatgtgtactggtttcaagttctgcttacctcccaagtgttgttttttctgaccctgacctaattcctcccaggccaggctggccagcaccttcttaaattgctctcaggcagctggaaggcctggctggcaggagccctgggtttttcaccctcagccccagggctctttgaaggcctactctccaagaacaaacaaacctggcctgacgctgcatagctgcagaataggggagctttctcggcctggtgcccagggtggccgagctgccagccaggtgcatgatcctcagttaattaggtaactataggtagtcctgcagcccaggctgtgtgctgattagtctgggctgttgttggagacctctgagaatagacttactctggaaagagctctgatgtttcaggtccagggtgatgacttttgagaaagtcttgtaggaccattcaaaccttcaggctctatccccctctctaaatgtcttttttcttgcctgtatacatctgctatgccttgaatccttgcagttttcagtctctctgaatatatcttaagttgcctgataccagaggtgtcctctcacagtgtgctcccccagcatcgtgctctgagcataggtggtgttcagcaagaagaaaggtgcctggagtgtgtttaggattccagaggagtgcctgggccgtattcccagaaggagagggcgttgttgcagtatggctgggtggtgagataggcctcctgcctgccccctcagtgggatggtgcttgtcagtgtgaagtaaaccctggagcacctgagggaggaagaggaggagatagatcttcagcttccagggattagactgaaagctcaactggcaaaatgcccattttattccctcattgcaagctgaaagtagagagctgaggaaccccgggcttgaccacttttttgcattgacagatcctttgtgggagacacatgatccacatgggcattcctagatccctttgaagactccataagcccagggagatcagatttacctcaggtttcaagtagatctcaagatcccactggaactcagattttcaggggagttcagaattagggcacgaagtgcaggagatggtatcaacagcaacaaatctgtctgatattctaaaagagttcatcccagtgtagccccaaagacttcagactgaaccagattcaccttgaattgaataagctgatgcaatattggcagctacacattcttcatatgacacctcttttctcaacttctcttcaccctgtagtctccacagagatattcctgagggatagcaagagtggggagctaacctgtttctttgcactgaatgagcaatgcttgtgcctttcctcttttcttgtatctgtacatttccagaggagccagtttatagagggtatagagtaacccaagaatacaggtttgggagtaagggagctggcttttattccaagtgctgccactggctctctgtgtcatcctggtcaaggcatggggtgggagcaggtgttgaaaggagcctgctgctggggattggctggcccccaaggagcttatgcccctcttgctaggatgctggggatcaggtcagtaacacctgtatttacagatgtgggctttgttacatatttaatatttaatttaaaaagaattaatgacagtcatagcccatatataacccacttcctgatgtgatttgtttggcccagttttacaaagttgtcctgtcagaggaatttcatttataaagttccttattgctgagcctctgtgtgttccagttatgagtcacatgtgtcaacaccgtggaaatgaaatttgtaccccctggacccatgcagattgatttgattctgggctaaatggaaatagaacctgtacaagtcaaatgtttctggagcatctgccatctacagggcacttggaggaaacataaagacattcaagacacaatccgtgtattcaaagaatgcacagtccagccaacaatgttttaaagcttccagtagtttcctaaaaaataccatagtctttttgagtttggagaatattattactgttgtcaattactttttattagcaccctgtatgatataggtactatcttaggttggtttccctggaagtcagctctgcaaaagagaattgcaagcagaacgtctttcgaagtgtgctttgggaagatacacctgaggatgcaaaaaagccaaagttcaacagaggaaaggctgactcgcaccaccagaactggatgtcccttcagaggtgtctctaatcgaggcaaggggcagtttccaaggaagggtgcagcagctggggaataagagtgtctgccctgaaagcagaacctgagtataatatcatggtatccactccaggcattcaaattcattcttatcaccatagctaatacttaccgaatgctttctgcttgccatagcttgagcgagtgttttagctgcactgtttccgattcatgcaatgtagagatgaggcagttaaggggcagagaagtgaactgcacaatgaataccatggtaggcagagaggtggagaggggaattattaataactgtcagactacacttttttatttttttgagatggaatcttgctctgtcacccaggctggagtgcagtgccaccatctcagctcactgcaacctccacctcccaggttgaagcgattctcatgctttagcctcctgagtagctgggaatataggcgcctgccaccacgcccggctcagttttgtatttttggtagagacagggtttcaccaagttggccatactggttttgaaatcctgacctcaagtaatctgcctgccttggcctcccaaagtgttgggattacaggcatgagtcattgtgcctggcctcaaactgtacttcacatgtaattttcaaagcgctatcccatgataggaattatcattcccattgtacaaattgagaaactaaagcatggagaggttaagggatttacccgatgtcacagaacaaagaagaaagaggtaaggccagggttttcctattagcctatgatgtctcacagagataacctgtccaggtagatacccagttttggctggagaaggcatcacagaccttgggtaattgatggcccaccagtttgcacccctttccattaatgtggaccgatcatgccctttgttgtgggtcagtgagcgtggtctttgaagttaggcagatgtgggtttgaattctagctctcattttatgacttacgtgtcagttcacacctctaagctcactttgctcttctttaaaatgggggtgataatgatgacttcattgggtcattatgaggattaaaagaaatcaggtatgagaaatctctcagcacattctcccctccctggcaaaagggttcaaggctgcacaaagattatctaagggcagatactctgaacatagccatagtttattgattcagcgttttgtcatttgcttccctctctcaagaggcaagagagaaagcgagactgtcttccatgcagtttgctcagaattctaacactagcctgttagtctaatcataacacatttcttcttggaaacaaacatagcaacagcaattatatcttacttttaatgtctaattggctgtaaacttgcttttactaagttatttccatcgaacatgtagagcattgtgcagtttgcttatcttgatgtcctcctcttgcagtccccatcttggctttattcgggaggccaattatgtgtatgctagccttgtgggtgccctagaaactccagcaaaggccagtgacagtgttgtgagccttctgctcctcattatccacagaggcaggagcctatcagagcctccaaccttgaatttttgtgtgagttctgcttctgttctcctactccaggtatgtcccctcacctggcttctggagtaacccatccctgctctctgaacccccacttcgctgtgccttcctctgcttctaaccctgcctctacgatgggctctctctccttttcctcataagccgatcattcttttcctgcaagaagtcccacagggaagccatgccatcctagccagacttggttatggtatgacctggcgttcagaggacacaccccagcacctctacactggctttcagccagatatgtcttcaccgcttgttgagacagaacagctttcttctacctttatgctatgaagcagcctttccaggagccctactggggccagagcccaagtgggaagatcctcccttaagctttcccctctgtttttccaactcctgaaacttacatccttctgcaggcttcaggactcagtgtaggtgtgtctgatgcccggtcatcctagagaaggggttgtgggaggggctgtacctgttgctatggcagcaaccagttgagatcatgaacccatttgattcagaggcaattgcaaggtgaatcaatctccttgtcacccactcctcttctcctccctctccatctctccccacagccttctgtcatctttcctcctccccactcaacctcaagctttctccttccccagttctctctctctctctttttttactcctagttatgatacatcaatgtagcagctaaagctactcatggtagacttcttatttatattatactttagcaagcatcacctaaagggcttattaaaacacagattgctgagcttcctctagagttctgatctggactctgcaccaggacccaagaaagtgcatttctgacaaggtcccaaatgatgctgacactgcaggtccaggggccacactctgagaacaactgcgctagactatgtttacccagtttgatttggttgtggctggaatattcctctgcattttgattctaaagtatttgattagctcattcatccattcatagaacagatgtttattgagcatctattcagtgtgaaacactgtactaggtactagctacctagagaaacataaaaccttgccctctaagagttcacagatctgtacaaaagacacagtaaataagtaattattatatggggtgataagtattgtaataacctgcaaataataagagatttaaaagtatacaaccaactccttgctcgtggcaagtaaaatatttagatgataggaatataaataataatgacctattcatttatttttctttctttgccaagaattgcctgaagggaactgagcttaacctatttaaataataatattaacatctaatgtttgtggagcatttactatgtttcagatactgtaccacatacaaggcatattggttaagagtgctgcggtcagactgctagggatatagtcctgacttgtcattatctgtgcaacctcaggcaagttacttaaccactctgtgcctcagtttcctcatcagaggaaaaggttatagtactagtttctgcttcagcagattactgagaagatgaaatgtgataatgtagtcaaaacatatatagtaattactccaaaacacgttgactcttattaccaacatattttgacctgaggctgaatatcacagaattggcctagagaaattgatatcttccagactaaataaatctccaggattttgtcaagagaatggatgggggctggacctcaatgtggggattagagaattccaaaacaggcctgaaaactccttggagcaccagtcagaggaagcagccctacttggctgtcggagaatcagtgcaccccaatggaatataagaaaggccctgatggatggccaggatttggaccatgaaacttgttttggaggagggagggggattgtcaggactgaggctttacagtctctggttgacacagctgaggaaggcagaaccctcaggctggggtgtgagagtttcaagcttagccttgaccagtcttgccatctagagaaccagggtcactttcaggcccaaatgccacggggctggtgctgtcagcattatcagagcgtttcctagcaatgcccatcagcaaagaggctgtgttttctgaaccttctccaaagaggctgccctctcccctcttcgatatgcacccccatccctgagagaagtgatttcctcttgttatttggaaatcagggagagagtttcccaatctttgtctggggctctacagggaccacagtccacattcatgttgagtcaggtctctcttttctgtctcttagacccagcttcacagctgagactgtagctatatgagaaagcagaatctaccagttttgttttaatcctttcctgagctcatcagagataagagtgatagaaactttcttcttacagagaggattagaagttctttgtggcaagatatacctgggaaggggttattaagtgatcatccctgataaagcccctctaatcatctactagttttgctattttagtggtgggaaaaaaaacacaaaaccctaggcacttaactcactcttggggaaatctttctaatcccttcctccctccctccctccttccctccttccctccctccctccctccctcccttcctcctttccttcctgccttccttccttcctttctgtgtgtctttgtgtctttctgtctttcatcctttctgcttgtctcagatttaatcggagccatacattccgcttattcacttatttgtttgttcattcaacaaacacttgctgagcacctactgagagctaagttgggttctgggccagaaacagacaaagcaaacctgcttcttgttcttgagggtgtcaaatattgtagaagtgaacaacataccagcccacaatgattatgttgcagttaagtggtatggtggaattcagtgtagggcataagggagtgactgactctgggaaggttttttagtgaaggtaacattcagtcagggattgagtggaggcttttcaggtggaaaaggtaggaaaggcattataggcagtggggacaacatgagcaatagtgtagacataggaaagaatgtggcatagaattgcaagaagctggatgtggctgtgtgacttggtatacaggtaggcagatgctgtgagagacagatgagctagagagggtaggttgggtcagtcatggtaggggattggcatgggcaaattcccatttcaaggtattaagcaggggagagacagggcaagatgtgttggttagaaatgacaactcttccctgctctgaagaatgaaaccagctgtgcctgggaatcacttgccccactttacaagatctccctggcaacagaatggctgttgtacaactagccagggaatttgctgtgacagtcttccaaccttatctgacatccagagcagggaaggaattgccaagttagggtatagatatcaaaggaattgaagcaacacaacattggaatagtattacaatatgaaattagaaactattttctctgctggcattgttgtaaataccagcatccatcactcccttctcaaatatattgtaagttaaaacattgctatttttatctctaacccccttgccctctaacccaggcaatacaatatagcttcttgaggagaggcccaagctgggtgtggattccgaatcttcacccagcttcacatgcttattgtgggagcttgggcacatcccctgtgccttctgagcctgggttgtgttgttattgttgcttgttggtttgtgatatggtttggctgtgtccccgcccaaaatctcatcttgagttgtaatccctataatcctcacaatctccatgtgtcaagggagagaccacgtagaggtgattgactcatgggggcagtttcccccatgctgttctcatgatagtgagtgaattctcacaagatctggtggttttataagtgtttggtagttcctcctgcattcattctccatcctccctccttgtgaagaaggtgccttgcttccccttctaccatgattgtaagtttcctgaggcttccccagccatgctgaactgtgagtcagttaaacctctttccttataaattgcctagccttgggcagttctttatagcagtgtgaaaacaaaccaatacagtttgttacatgtacaattgcaatagcacctctcttgcatgtggttgtgaagattaatgtatgctatgcacctggtccaatgtccagcttagagtagagtagatgcctttttttttttttgagatggagtctcgctatgtctcccaggctggagtgcattggcatgatcttggctcactgcaagctccgctgaccaggttcacgccattctcctgcgtcagcctcccaagtagctgggactacaggtgcctgccaccatgcccggctaattttttcgtattttcagtagagatggggtttcaccgtgttagccaggatggtctcgatctcctgaccttgtgatccacccaccttggcctaccaaagtgctgggattacaggtgtgagccaccacgcccagccgagtagatgcttaacaagtggaaaccattattatttttctccccttcgatacatggagccttagggtctaagtgacaggaaaatgttcagataaagatgttttaattatgtcttcttagtacttccagaaagaggtctgcatgggtttaggtcagctctgccttccgacagcttacgtgcattcttgtgttgctctcccatcttcactgctcttcctacattccaccctaatgaacggcagagagagctatgcaaagtggtcaaagtaaaaagggattctttccgatgtttcccagattggagaaacaatgaacatgattactttattatctctgttttgttttaatcttgttgtgccccaaactaatggggatgctcatttggaatgagctttgtgtatctttgggcaaagaggaaaaccaagatgaatttctaggagggcagcaggagagtgaataagagagtacaaatcatcacaaatcaagagatgagtaaagagaagggggttgggaatggcagaattggaacctgagagttagagtccatgagagagaggagaagcaaaatgagaaatatggagtctgagtgggaaggaaccccacatctgttgtctgatacaggcacctactcaagggaggaattcggcatcagtgtccctcacagatggttgcctgacacagtgatttctataaataacaattatatggcactacgggaagtggatgaggctacttacaaatggagctgaccagcctggggactgactgtccccaaggtctgtcaaagaggtgatgggaagatattttgtgcacatctgtagctcagtgtgctatgagaaactgacctcatagggccatcttggagtgactcacccatgtaccttcaggccttcaggtgattaataggcatgtaggactgacgtttcattatcactgcatcaacgctgatgtagacttattgagcatgtcttccattgatgctgtcttgggttctggagatacaaagacttacaagccatggttccttgctttcaacctgtttttgttaaggaataggagtgtttcctgtggccacagaataaacgaaactaactgtcctggggcttcttcaggaaaccagtggggctaaccagacttacatagtgtttgatacacaatcattaattaaaacagagatgttcaatgataaattaattcgccttctgctcagaattcattgaggagggaagaatggaagccaagaaaaatgattatctgaagcttttttcttgagcgtctgcccttgtaggctgtgctgaatatttgagtgagctaagtgtacttgctgtatgtcaacagagatgacattttacaggtgatatatttatttccagagaaggaaacttatataggcttgtgaagcagaagaatgccagcaggtttctaatctcctattagtaaacaacattatcgagaatctcctgtttgtggagtaatattctaggcatttgtagagtgaacacagaaataaagatgcagttctgtctttaagaaacattcagccctaatgggaatggaggaccaatatgtaaaagagacagaacacatataaagaaggtccataaataagtgcaaataaatgcctgagtgcagcacttaatgttctgttttctattataggtatttgtactcacgacttagccttcttatggataccaaagcccttgagaactgttttcctttctcattcatcttgtgcagagtacacactcaaaagtgttgaatgaatatgtatgctactgtgaggtgtgcctaattgctgggggaattctggagtgaagtagaatgacatgtttaggggaaaccttatagcggcttagcagtgttttcaagtatgagaggacttgtaattggtggagtaaggggacaggagggagaagaaagaaggaagagttcacggggactgagcaaatccaaacaatttatgccaccattcagggtcctccatgatctgatccttcaggtcttaccttgccttgcttgctgccaccaaaggcagcccactgtggccttagcattcccacctctttctctctccttggaatgtcttcctctgttgattggccatctgaatccaccttccacttcatgtctgggtgaaagtagagtctcaggaagccttacatgacatctctatccttgctcctatcttcattaaatggcagtgtttgcaggtctgatttcagtggtcttaaccttcagaggaaacgagagacaatcatggtcttcaacctcgggtagctttcaaatgagatcatgaggcaacactaattttttgtttttttttttttgttttttttttttttttgagacagagtctcgctctgtcacccaggctggagtgtagtggtgtgatctcggcttactgcaacctccgtctcctgggttcaagcgattcttctgcctcagcctcctgagtagctgggactacaggcatgcgtcaccacacccagctaatttttgtatttttagtagagacggggtttcaccatcttggccaggctggtcttgaactcctgaccttgtgatccgcttgcctctgcttcccaaagtgctgggattacaggcgtgagccaccgcgcctggcctggggcaacactaattatatacaaaataataagagggagcagggctgtatataattaggtgctaaacagagtagacagaacagaagaactgtgcagagttgattggaggtcagaagtcctgcattctggttctacttccatacccaataagtggagtaccttttggcagtcacttggcttttgaaccttggttcttctgtaaaatgaggggtttgtgcaagatgctgtgattccttccagctctagaatctgcaagatgataaaggttagagtactcatattagactgagtgggaaatagtgatttgttagtaagaggggagaggggaacatcaggaaaagcaataaatgatggcgaccagaaggattgattcctgacaaccataggacaaagtggagaatcagagagggactggttgaagagcggttaccttggtattatccagcatgttctttctggaataggatgggcactgcacaaaacgttcacaatagaggatatatgaagcctcctgtactcttttgcgtttctgatactcacctcccctcttgttttcagagccctttctggtgcttgccactctttaaagaatacaaatctctcatcagcaagccctgtagaaggggcaaaggggtgatgcactttagctcatcaccactgggcacgttctctttaatcctctcttaaattcacctgctttggctgatctgcatacagtgggagtggtgtcagatcaacacactggccttttcccaaagcaaagcgggatcccagcctggatggcccagcacagggtcagctgcctccatcctggccccccagagcatctgcctccccagcaccctgggctgcagttgcagagggccttctttttaatgtttttctaataatcacttttttcaaaccctaaaacaacactttgttattgcatgatagttgcaaaaatataaaaataatttttaagaataactcatttctaccccctcactccccccacaggttatcatcactattattaataacatttttcactgttttgactaaaaaaggttttcttttaaaattcacccatgacccagaactatttaaataaactaattttattttggagaaagaccctaaaacttttattatagagattttcagtcatgcacaaaagtagagagaataaaatattaaaccctatgtaacccacatcagccccagcagttacaagaagaccttaaagtctttagaggatctggcatctccctgttgggcttctgtgtcagagttcagaaagggagaggggagggacaggataaatatcacatgacatcaatgttggaattactaggatttaagcagagggattttaagcacagcaggaccctgagccctgcccatattggaggtgcccacttttgcagaccctgccacggcagccttcgtagtcctatgtggcaccgctctttgctcttgaattgtcctcccaagagcgtggatgggttttcactgacacacgggtacctgcctgcccagtgccagtggtgaggactgcccacatctggggtgggccatgccagcccttgcagctgaccggccagagctcctgaccctggtctcggtagcatcgtgtggctgcttgtaggttgggtggaggagtgtttctttctgtgctcctcctctttgccaaacactctgctgcattttcccactggcaaaagaaggggaagaataggtggtgaaatgtggttctggactgaggcactgcttcatcctcagtgacaatcactgacattcttggcagcggggagatggtggctgcatcaagtccagaggattctgaatgacctgaatgtgtgggaagccttgcttactcataacggcccctggctaagtcagatgctgcctccagagattgtttgtgtggggagacttagtatgtttattaaatatactcagggctccaagttacagtgaaacgccctgctcctgggcctgacaggctcagcctcctggctgggtggcagcaggtgcctatgtttcacttggagctctaggtcctcattctttcccctgctccccaacctttgcctcttgcctgggggctgagaagacagctttcatttttctggctgtaagatcctagtggtgactgtcctatctgtcttttgttctgccctagaaggtagtaatagtatgggtaggattgcttttaagagttctggaactaaagcagacatgaagagtcaagggtttgcaagaagttgacccattttggttctagattgtggccccagatctgccgataagttgcttggatcctcagggaagtcgctttgcttccttggggctcagtttcctctcctatggaatgatgagttggatgacttgttctcatcatcctcttccaagagtatgactggatttcctagtctgcaggaaacccgttataggcatttaattgcccagtgatgtgtggggtatgctgtacattgtatccttttcctaaaatgtgggtgtggtcagaggaatcataccttggctttgaggtagaaacaccatccaactggtgtgactcaggggaggggtgttgccagctttgtatggtgggtcaaaaccctgatagaatgccttaaatcaaattccctagaaactgattgtgaaactgagcttcttgtggcagtgttttaatgagggactgctcttaggagttacctaaaggtatgtgagggaagcaggataggtcaagggaaaaactaggcaaagcctcagcctggttccatgggcagcccaaagtgtgaattccaccacagcaattgtcttacccagtggcaaaagggccgggccattgataactcctacattaggtagttatctgttacagccccccatcatcaccagcaggggcaggaataacattccaggtgaagctggtctgtcaggcaagggcaagcatctgaaaagcgtacaggagcaaggcaggtgtgagttattagcagccaacagttacatagcagctgggggatgagacatgggccagaatgccacagagcctgccacgtccttactggtgacagccgcgcagggaggaaggcaggagtagggtgggagagggctgtcctgggtggctgattcctgtggatggctcagcacatgcaggaaagtgttcagatgggatttccaattaggtcaatctaagtgattgttctaaaagttgggatgatgttacatttggggtgggggatagtgtgcctaggaagggacgtgaggaagaccttaaggttatctagaggctggttgtccagtgatatatattttgacaaaatccggggtacctttatgacttgcatttcagcataacatccacacagagctccagggcgctgctactgcaaggtagtagcagttcattctgagagggcgttccccaccctcttttttcttcttataggtcccccacttcttggcatgtcttcatcttaatctttttctccatctttcttctacctccataattaatcttttcactgcctttctggcttctgctgtctcagcgaaggtagtttcttagactcccgtgttattgttttccctgaaaacttcagcacatccttttctgacttcccggacccatgcaggcccacctgccccagttccctgtgctcccttcatagcactgaccacactccagagttaaagttacatttgtgtgctcacttgcttcatgggtgtttcccccattagatcacaagtttcaaagagctgggactgagactgtcttgctcatcatccttaacacacagaaaattatctgtcacatagtaggtggcccatgaatgtgttgaataaaaaatatggcatttcagctccaagacatggaatccaagtccctcggggtgggacaggagctgtcatacttggtgctggaggaaatgggagcctaggggagggtgtgctggcctgtgaggtgcaggaggccaggtatgtgtctgtgagggaaggtgtgaagtagttgaatcagtccctggcctctttccttccccactcactgctctgtgaattttcctttccctaggagtggtcagcagaggctttggacagatgcttctgcagagatgaatggcctggcttttttgctagcctatgttggctgctccaaccctctcctggcctgagccgaagatctctcctcgagatggagccttgagtccagcagttcttaatcaaaagtaatcttgtcccccagaacatttggcaatttttgattgttgcatctggagaagtactagtggcctctaatgggtagaggacaggaatgctgctaaggcacacacaggagagcccccaccaaacagaactgtctctccacaggtgctggcagtgctgcagtggaggaagccctgcctaggccagccctgatctaaccagcaggtgctgctgacagcctctggagcaggtgttccccagagaccctttgcttctgaaaggaccatggaatcagcatctgccttactcccagccccaacacactcagcctccccactcagtcataggcaattcagcctcccaggttacagctgctctgtgaagagggtgcacagacagggagaatgttttccatggagccctggggaaccctgttagagacctgtctctggggctgggggctgggccctgcctgcatagcttcagctcaggggacccatggggcccctttcctcctgcttgctctatccccatctttctctccaatcctcctcccaccccaccttgcagcatctcccccagtcccctggagattaatgtgataattaccatgtgtgcctgtttacgcagggagtgggtgagctcaccacccccatcagtcaggttcccaaaggaacacattcccacaatgtcaggactggtacccgctgagcactcctgtgcaggtgggctgccgcccccgaactgctttctctgtcatcaccctcgtcgtgcacacgtgtgcatgtgtgtgtcactcaggggatcggcaggtgaggaagatggagagcagccagtgtgccagtctagggaagggctgggtggggagggtgttgggagatgggaggagcatcagtgccccatgtaagaggacactgaccaaagagaagcactctcctatgatgcctgactgatagtaggtgttgcatgagtggtgtgggatggaggggctggcgtcttctgggcagcattctttgcagggagggccctggtttcccttagctgctccacagtagaggtctgggctgtgaaggttctcctggggccagaatcttgattggagtacttagcatggctgtcccgtgttcctgaaggaagagtctctggggaaaatagagtgcaagtcttacatgaaaggagcttgcgagaactgccactctgtcacagaagctgggggggatgctgtagagagagaatgagtgattctccctctcacaggcaaccctcctctcttgcacctcctgctgagacagacacgtgcacaccacgagagagaaaacagtcacaactctgtggttgaactggcagcttcaccccgacttccacttcacgtgctttctgggtacttgctgccttgagttgtcggttgctgctgcttttttaatctcaaaggacgcttgagtcattgtctctcctacactggacaattttgttttaataatgatgaatcagaaggagattgaagccccaactggcatcagaaagaaccatgccattttgaaaaagggaagcatgcattcctttgctagcctgcttcctgccgaggtgtgtccctttgtcctaccgggtgtgtcactgacccgtggacaaacatgcaaggggagtggaagccagttggccaggaagaatgaaacaggagggagaggagcaaggtgtggagaagggtggggcaagcctattaaaaggtgtgtgaataacctacaggagctgtcaagctgctttctccagaagaaccttttaagctgtcagtcatcttcaagaacccccagggccttgctggtgctggtgtcttcccagctatgcttttctccttctagttcccatcctcctcttttttcatccagcaggccccactgtggtggataatgtttgcggcaattcagagaaatctccacagattgagagggggctatgagaatgaattgtatcagtgtatttttaacaggagaatcttcatattagaattgtggacgttttttgattagtcgaccatctatgcatgccaaaccctttgttaggtgccagatacagaaatgagcagacagttaaggtttctgcctgaatataggttgaagcaacaccaaaacatactcacaaaatgctgaatcaaaagacactgctcgtcattggttttttatagaattgagaaacacattccagattctgacccactgtagttcctacatttcaaaggctatgttcttcgatgtgttactagattttctctgaaaatgagggtttcactatgatcaaaagtgtttatgaaatggtggaataaacaaggtaaataatgttctttttttgtggatcttctcacgggctcagaagaaaatataatctgctgtttcccaaatttctttggttacagaagccccttttccacaaaatacactaacttcttacagatctctagcaatgagaacaatgtaattttggacatcctcattacagcatccctggcaagtagtcacccaagtgaaattgctctgagccaccctcaaactgtagctcaattatttaagaacaaaattatcttaaaagtcacaatttcatcattgctattgctgatacctgctaatgtttgttggcaacaaagtcctatctgggtgctgggtgtagactcagtttttgttgccaaggaatgttggggtgctggggggtttggccactggctaagccatagagtgaataaaccctgttaatctggagctttactggtgaaccatcagagctagccagccttacagaaggactgatttgtaatcacaaataaacacagagctagctatacaaatatcattgcaattcacttttcagctcatagggaaggtccatgtcttaacgatctcagagaaaacggcttcctacctcccttaaaaccctcaacaactcttggcatctagttcctttggatctttctactaatattcaggaacagttttctctgaggtctggcccacatcttccctgattgtatttaactgaccagacctgattgaaccaaagagctccatcttacacactgaaattggcaggtccctgcatctgtcccttcccattcagaaagtgttttcttgtttacttttaacttttattctgcttcaattgcaattatctctctctgaatagtgtaggggcaaaaaaaaaaagacacaagtgtggtgaaaggagattgccttagaagctgttttagtggggtgattcctcaaataccccaaaacagaactagcattcaacccagcaatcccattactgggtttgcttacaacccaaaggaatataaatcattcggttataaaaacacatgcatgcatatgctcattgcagcactattcatgatagcaaagacatggaatcaacctaaatgcccatcaatgacagaatggttaaagaatatgcaatacatatacaccatggaatactatgtagccttaaaaaaaatgagaacatgttctttgcaggaacatggatggagctggaggccattatcctcagcaaaccaacacaggaacagacgaccaaatactgcatgttctcacttataggtgggggataaatgatgagaacacatggacatatagagaggaacaacacactggagtcttttggagggtgaagggtgggggaaggaagaggaccaagaaaaaagcagctattgggtactaggcttaatacctgggtgatgaaataatctgtacaacaaacccctctgacatgaatttacctatataacaaacctgcacatgtacccttgaacttaaaataaaagttaagctgttgttaatggatgaatcaactatacagtgatagcttccatgactgataagaggctatattctgtggactggaatatttgaatgggagacagaaatgagataatttggaagaaaacaagagaatgtcacagaagtccacaggaagcatggggacaatgaatcaaaatatgttttcagaatttagtagtgagagggggaaaaggtaaattggagggacaagaaatactttgctatagaaattctgagttctggtcttaattttactaatttagcttgtgagttttaggcatggcatttgactttggccttgtttttccagtgaagtagagataaaatatctgttgtaagtttcaaatgggtcttagagtttgtgtgtgagagagtggagtgggggtcgaagggatttcaaagccctgcatatgtgaaatgcaattcagaaagactatttggaaagacttcgaggtgctgtcaggggaggaagagtcaaagggaagactgagaacccttagttgagtggtacagcttttagagagactcccaagctctatttcaaggttctaataagatatcctgctaagaattgcttctttgtttaagtcatgagatataattcttcctcaatccctgaccattcaagggtcttgcatctgattcatgattcgagaatccggaatatggatttgcaggcattttttaattcactgagtgttaacattagagtgcaagtgatcactcttcaaatctagatttattccttgttctggccagagccttgctggggccaagcctgggccagctctgtgctattgtactatgatggaagaaagcaagctgagcgtgggtcaagggctgagcaagacgcagaggaccctaaaatgtcttccaaataaccctgtcaaggcctttgctagcatccatggaatagattgggcacagcctgcctttgtctttttgagaatttgcccaattttgtgtgcagaggcttagaacccacattaccaaatgctataaaaccagtggttgtttgcgtgaccttggaaaagtatctgacctttctgtattgtcttctcatgtgctaagcaagagtgtgagaatattccaactcagtatattatggtgaggctgatgctgtgttcttcattacgtacatgggagattttgagctaactcacggtaataccaaattgggaatggagtaaggcaatatttaactgtattgcattgtggtttttacatcaccctctgtgcagctgcaagaatgtaagctttacttatggaagatggctttaagtattaaggaaccatttttctttctttcagaccaatgatgccttaggagccacctggaattggctgtacttcatccccctcatcatcattggatccttctttgttctcaacctagtcctgggagtgctttccgggtgagccagatgtttctctcttcttaactcatttgctgactgctaactgtaaactaatgcctcctgactcatggcagattcattcatttaaccttcatttagaagacacttacctagcagttcctctgtgccaaatgctttctagatgctgggaatgcagtagtgaaccatcattctaataatcttgattattctcaggaattaaaaagtcttgatgtcaggcacaacactgaacacagtatgtagtgagagttcatttattcatccatgctttcattcagtaactcagcagtcagagacctatgtcaaacacggtgctggttgttagggaaataaaattgaactagacacaggctgtgcctcaaaagtttcttactctgtagtgttttggggatcaagtctcatatttgtggcttgaattagtttatacaaatctgcaactatttggggtccaataccatggtaagcatcgccaggagcacacaaagtataaggtgtggttcctctccttaggaaacatgttttgccaagaagatgatacacatgaaacagagaataggagttcttttactgacttatacaaggtataatcatttgttttggggaaaggacaaatctatgtaatctgaagtcatcagggatagtttcatcaaggattgagattttgcttggattatgaaatatgtagtaggattacatagactatatgggagtgaacatttcaggaaggggaacatcacaccataagcaaagatgaaaaaatgggacttgtcatggagtgtgaagaaattataatgtaacatcttaggagagctgagacggggatatattttagagattcttatatttttctaagcaaaactgaacttaattttttgtcagagtggcatacgttcttcaaatgaaaatttataaggtggcacttctgtttaaacatggcagattgaactaagttggtcatttcttgaaactccactaacacagaaaataaattttaagaagggcactaggacaaagagaacaagaggaatgacaagagatgaaagatgtcaacaacatttttgaacatagaaaaaattggcaacagacagtgataggaaagctgaagtttaattgtttagggaatgccagtaaaaaagcaaactgattgttcttcggagccctagaaaggctcaggaattggagacaccaggtaggtctgagagctggggtaggcgtggtgctaaaaacaaaaggactgatgcaaagtccttgtaaggaacattagaatccctgccccaccccactataacctccaggcaatgctgacagatatctgcttcacccaactcccatcctagcaaaagttaggagacttaatctctgtagatgtggaatcagagaagcttggaattgtaccatcagatacacctgagggtagtgttgatatgttgtactgaaaacaggagggctaaatgaaagtctacaaactgaatgtgcgtagtccagcccacttctgcttgactcttaaaaacatagcagtctggtaggagttgagaggattcctcttttggggaactgtctgaagagaagggacaaatttatactgatatttgggagagaccagagaaacaggttcctacctcatcacctttggtgagactcactgtattaattacctatggctgctttcaactaattaccatagctccgcggcttaaaactgtgagagaaacttcattttcttatagttctgaagggtacaggcccaaaatctggtagggccattgatatagtttggctgtgtccccacccaaatctcatcttgaattgtagctcccacaattcccaggtgttgtgggagggacctggtgggaggtaattgaatcatggaggtgggtctttcctgtgctgttctcatgattgtcacgagacctgatgattttgtaaaagggagtttccctgtacaagctctcttctcttgtctgctgccaagtgagatgtgcctttcaccttctgccatgattgtgaggcctccccagccacgtggaactgtgagtccatgaaacgtctttcttttgtaaatgcctcagtcttgcgtatgtctttattagcagcacgaaaatggactaatacagctgtgctccctccaagggctctaaaggagaattgattttcttcctcttccagcttctggcagccccaggcattccttggcttatagccacgtcactgtaatctctgcctctgtgatcatattgcctctttttcaatgtctgtgcagttttataaggccacttgtcattggatttagggtcattctgataagccaggatgatctcttatttgaacatccttaacttaataatctgcaaagattatttttccaaataaagtaacattcacatgttccaggacttaggatgtgaacaaatcttttggggggctcccagtcatcccattacattcaccattctacaagctccaagcttgcatacagagttgccaatgaggcttttgtgccgtgcttttaaatatgaacacacagctagggatcatcagcatttgaggaaaatgcccaacacaaaagaacaaaaaacaaaatcatgaattataaaaaggtaattgagggaatatgaacaatgcagggagtagaagacaaatttaaaagctgtatctgctattagagatagaagagaaaccatttcatttacagaataacaggccaataaattaaaaaaaaaaacatttagaggttaagggctcttggaaattaatgtaaaatgtacattcattttacaaagtaatatatatatacttatatatatttacattaaatataaaaatgaaataatgtaaaaatataagaatgtaataaaatataaaggtaatacatatttggaatataaaattgatgaaattacctacaaaacagaacagcaaaataggattgatccagcttttaactataataggagttctataaaaagaacagagacatggaaaggaagaaattaacaaaaatctaagaaatgttcccagagccaaaagactcacattgccagattaaaagatgtgttgaggcagatgcaaggatgttctttccagcattatttcatggtagtggggagttggaggcaacgtggatgtccataactgggagattatataggtaaaatattggatgtataccatggcacagtatgtagcagtatgtactgtggcatcctatgtagcacagagcaacaaatactgtgtacacatgaaacataagatatcttgggcggggcgcgctggctcacgcctgtaatcccagcactttgggaggccgaggcgggcagatcacgaggtcaggagatcgagaccatcctggctaacacagtgaaaccctgtctctactaaaaatacaaaaaattagccgggcgaggtggcgggcgcctgtagtcccagctacgcgagaggctgaggcaggagaatggcgtgaaccccagggggcggagcctgcagtgagccaagatcacgccactgcactccagcctgggcgacagcgagactccatctcaaaaaaaaaaaaaaaaaaaaagaaacataagatatcttaagaacatagattttagtgaaaacaagaatcactgtgatatgataccatttacataaaactacatgcacacaaaatatacagtttgtgaaaatacattcaaatcaaaggcacattttgaatgtattataatttttttaaatttttattttactttaatgataatttttatagcagggtgatataaggtaggtatggaggtaaaagagaacaaatgagtttaattaataatgaaatacacactgaaaactcagcatgactaatggaaagtgagaaccccaaggtgaatcatcatgaaatttcagaatatcagattaaaaaatattctgaaagtgcctggtaattaggaaggagatagaatttatctacaaagaaataggaatcaggatagctttgggcttctcaatggcaacactgaaagttagtaacaaatagataagttcttaaaactttcataaggaaaataattttcaagatagaattctatacctagctcgaataccaattgttttttaggatgggatcacaatatttttgatatccattttgaaaaagttactggtgaatgtgagtcactaaaaataaggaagtaattgaagaaagagaagaacgtgatactcatggaaacaagggattcgatggaggagagaaagaagaggaattgattcccagggcgatgaacggaagtctaggatgacagaagcctagagagtatcaagcagtatcaagatttgagtagggtgacagaggcctctaaaaatgctatctgtaagaaaaaataaaactaatgtattccccaatgtgtgttattattttcaaaagagctcatggttttgccaaaactatatacagtcatgtgccacataatgacatttcagtcaatgactgatgtatatgcaacagtggtcccacaggatttagtggagctgaaaaattcctgtggcttagtgatgtcatagtcatcttaacatcatagtgcaatgcattactcacatggttgtggtgacgctggtgtaaaaaaaccctgaattgtccatcatataacagtagaacatatacaattatgtacagtatatagtattcgacagtaaatgactatgttactgatttggcatttactttcaattgttattttacaatttattcctacttatttttaaaaaagttatctgtaaaacagtctgaggcaggttcctcaggaggtattccagaggaaggcattgtcatcataggagatgacagctccctgtgtgttattgctcctgaagaccttccagtgggacaagatatggaggtggaagacagtgatattgatggttctgaccctgtgcaggcctaggctagtgtgtgtgtttgtgtcttcgcttttaacaaaagattttaaaaagtaaaaaagtaaaaagtaagaataaaaaaagcttatagaataaggatgtaaggaaagaaaatatatttgtacagctgtacaatgtgtgttttaagctaagcattattgccaaagagtctaagttaaattttttctaagtttataaggtaaagttacagtacgtgaagattaatttattgaaataaaaatgtttttaataaattcagtgtagcttaagtgtccagtgttgataaagtctacagtgccatacagtaatgtcctaggccttcacattcactcaccactcactttctgactcacccagagcaacttcctgcaagctccattcatggtaagtgctctacggtgtaccattttttaaaatcttttataccatatttttactatcccttttctatgtttagatatatttagatgtacaaatacttaatgatgtgttataatttcctacagtatttagtatagtaacatgctgtataggtttacagcctaggagcaataggttacagcatatagcctaggtatgtagtaggctataccatctaggtctgtgtaagtacacattctggtgttcacacaacaacaacattgcctagcaatgcatttctcagaatgtaccccttttgttaagccatacatgactgtatgaatatatgtatgtatttgtatatacacacatacacaaaaaaacactctaagcatttaattccatgaaatatgaaattgttaccagtaagaaatataagcatagtaagtaggtcctctattcagctcagttgtcaaccaaatttatgttgctgatgctgaattttgatatagccccttacagtgctgtgattaccttaagtggatggaggaggctgaatatgaggaggggaaagggagggggagatttcagtcaaagactgaaatcttaggttccacagtaaggaagtatttaggcaatatctaaaatggaaagataaagacatttcagtttttaagtataatatttagaaatttggaaatgaataccagaagaaacaggtaaaagagttgaaagtggttgcctctggggagtgaaattcaggggttaggagaggtaaagcagagggctgccagtttttcattagaagtctttcaaaattatttgactttttaaattctacatgtgttactttgaaaaaatagaaattaaattttaaagtaaaaatattgcacacacacaaaagtgtaggacgaaaggcgtatataagaatattcatctaacatccgtgggggaaggattggcatggagagagaccagattcagtaggattaagcaggaaacaaccatagtaatccaacgacgtggtactaagagcctgtggtggtaatttgtgaaaaactgaagacatcgtaaagaagaactttaataatgtttattttgagtggagagtcttaagacataagagatttcttctatatttactcattcagtgagtgtttgttggcattctttgttcgtgcccaagcactgctagacgttactgtctccagccagccagtacctacaactccaatgtgcaccttccataactctggcccccagagaagcctgaccacaggctctcctcttgtatttctactgagaggataatgtcatgtttgtgtaatcttatctgatattctttgtcctaagtgtgtatatattttagtttggaaaatttaagacagattcttactatatatttggggagaaaagtagatgtggtgccaacaaaagccactggtgttctggatgaggctccagcataggtttgagttgtgtcttaacagagctggaaatggaacagaacactaccatactggacagtgccttgtgtctgaccacatggactctctctggtttggaatcacatcttttcattctcttacgtctttctctgcatgggaaacagttgtacattggaagaggcatgggctttagcatctgacattcatgggtgagaagcctaaccctgtaagaaaccacttattagcattgcgaatttggataagttactctgagcctgcttcctcctctgtaaaatgggatagcaatagctctctcatatacaaaaccctagcccagggtctggcatggagtagcccttagctcttattagctgcctatatccttcgataatattaacatacattttctcagcctcttaggtccaggtggcatcacctgcttaacggcctgtggatgttcgattgatccagctgtcgggccatgggctcctctgggagatggtctgcacagattagatgtcatggaactgggatggcagatgccttcttagcacttctggagaagcctaggaagtgacagtggcagctgggaacagctgatatgaataaattttgacattttaaggagtgttcacaataggggccttataggctgggactgaaatcattctgacctggtttctttttctcattctgaagctcagcacagtttggggtgggctttattggtgtctgcagggggttcagcagcagccagtcctgtgtacaggaggggccgtgggttctctcttctgcttggttgtctctcacatgcctttggaaagattgtgagctttctccttagagtgggggtttagttgggatttaattcagaagcagcctgggaaatagcttggaaacctagggagcaggtttcttgtgacctgcaggcagctgaatgttatgtaccaaggctgttcccagagcagagagagacagaaattaaagggggaacacacatggctcctaggttgggcaagtgagggagagagtccatgtgagagggggcaggccacatccactggtgctcagggacccctggatgccaagtgtggaaatgactgaggcacctgcctctggggcacaggcattggtgggaggaaggctgtgaggcatgtttgtcggctcagatttaaagaggaagtatggatggaagcattgtagcatttttacttgtctcaaaggaaatgggatttgatgaaaaccattagcttaggcatgaagagaagcagagcttcctgtctccatggaaacaaagcagggctgcataagcacatcctgaaatgccatcaggggctacagggcagcggctaacacaaacagaaatgaccatgagccatcccactgtctccatccattgttgcctgggcttctggacagggaaaggtaaatatggggaagcagttgagctgtctcaaaaccagagcagggacagtcagaccagagactgcttccatatacgtgtggggagcaatgtgagctctcttgtgtaaagcatgccatagttttcaaagcacctttgcttttgtgatcatatttgttctttgcaatgactccatgcagtatgtggacagtatctttatttggaaatgagaagagggaggtttagttaatctccaactagttactggcagaggtggggccagaggttacaatttctcaacttctagttagtgcttattttagtgtacactacgtagcttctattcagggatactgacacctgaggtggcatacccagagatatgccgccagtggtaagcctggaatatcatcttgaccatatagatttggtgcaagttttaatgtgtatgtgcattgatgtacacactaattcacacacactgatgttcacgtatacaatgtgacccggtatgtgtacagggcagaagatgccaagacccactgtcaaggtcctgctgccctaagactaatgggaagtagtgaagtgtccatagtagaggaggaattcttctggttgcatctcatgaatgcatagagtggctcccacgacaagccaaactacagctgtctgccttgctagcaactcatgtgcaagctgattctgtgcaattcagcaagtgtttattgagtgtctgctatgcaaaagatacctggctagacatttagaatacaaagatgggtaaaatgaggagattgtagactaattatggaaatatttcaaaaatacatgtaatgggactctaagttcaaatagtccagaaggctagtccctccccaaagctaatttttttttgagattcatatatgcaggtcactaatgttgggttcctactatcttgcaaggcattgttgaggataaaaagatgaataagacctaggtcttggccacaatgggcatattaacaactataacttcagtgttaaaccttgcatctcctgttgggtgtgccattgcatcttaggaggtggttcctgagtgtttcccatgcctgacctgagacaggaatggctgctggtcttaagaaggaaattattcatgcccagctcagtgttccagatgagatctctgaggggagttggtgggtattagtttgacgtatatctgctcctcccaaggctggctgacattgaaggtgactggctaacataagggagagtaattctgctgggattctaacactggaatcaaccagtagaaagtcaatgactgactcacgcaagagttactaagtacttgttgtatgtgactcactgctaggggctagggataccaggtcaaacaaggacagagagctgctacccctcaacgggtttgagtctaggaagagatagcaacaggggagcatttaaattagaaggggcaaggatcaggtaaggccaactgaggcaggtgacagtggtgtgtgcctttgaagagccagcgatagtttgcgagcacaagggagaagcacattctagcacagaggcacaggcagaggctcatcgagaagggcttcttgggctaagctggtaagtttaagcttgattccagaagcttgtgggaggttttagattgttagataaggagatggctagatttgcatttgaagatgatcaccctggagaaggtacatagagaagcaagactggaagcaaacagagaggagcagcagttcaggggagaagcagagaagcagcggggctgaagtacagcggtggggacggaaaggacaggacagctccaggaggtgttgggggccaggtgtcggatctgcaggactcgggactgtgtgggtatgtctgagtgggtttggtgtggaaatcagagggaagtcttctggattgcttttaggtttctgaattgagactgtaggtggctgggggagaacacaggccaaagggtaggtcttaagggaaagagggcaggttttggacctgttgagtatgagaaagcgtaacacacttcatgacttttggccagttcacaggagtagagtagggtttgttttaagttgtttttcttgtaagctataattttttgagactgtgctacccatcaagcattgtgccaatcacatgacacatattgtctcatttaatcctcacagtgaccatatgaggaagtactaacttccttttataaatagagatactgtgggatgcttggtaatttgccaaagtaaacaaagctcatgagcagtagattcagaatttggactgagatctactaggcacaaacacctatgcttttaagcagatcctccagatagtttaaatgtcctttatggaaggaaattatctgtcatctagtacagcagaacttgatgaaaatgaacaggtcctccatgacggccatggcacatgtaacttcccagtcctgtggacagaaatttcctgtatgataccctgctatgatgaccagagtggggtgttcataattcctacactgatgagaaggacttttcctgggtgagttgtgtgaccatgggggtcacataaaaagcttatgggagcttgctgagagaatctgcatttccccaagacactgcttagtgtatcagttgtgaaaattgtatcttagggtgagataaaaattatttgaggaagacaagactctaagtgtcgtttgtgcctgcctccttgttacagtggaggaaactcggctggagagtgaaatgacttgctcagtttgtagacagctatttagtgttagaccttggctagaagctagctgccctggctccctgtctggggtgctttttcctccatgccctatgtatagcctagtagtaaaatacagactctagacagtctagctgggtttgagttctgttcctatcacttgccagctatgacaatgatgttaggtaaattatttcacttttctataccttcagttacccaattgtgaataaggatattggtgtttgtcatataagattaccggggaaatgaaatcagataatacatgttaagtgtttaatacctgggtgatagtaattacttaataaatgttagctgttagtagcagatttctttctcaagagcctggtttacactcagtaggtggggctgggaaagagccattcttacctaccaagtactcccattgagtcaattagcatgagctcagatgttttcagataccactggtagagctgaccatccatggcaccctacagggaacagcaaagacagactgtgcccttgggccccacatgaggccatcagcttagacactccaccatttgaagttccttggagtacctgggcctttctattctctgctcatgtggtctggagtaagcctctaattttctttgttaaattcctgctcatccctctcagcttgttttaactttggcttctttcacaagatctttccaggtctataccccccaatctcattttacaattagtattaaaatctttctcccacatgttcccatagcactatatgcctgtttgttatagaatctgtcactcatagtaatatcatggaattgttatataatttaatactactaaagataagatgtaatatttattgaaaccttgtcatctgcccgataccatggtaaatgctttatatacattatttcaattaatttttgtaacagccttatgaggcaggtactgctgttaaccccattttataattgaggaaatggagactgagagtggctaagagtcttgcctaagggtgcacagtctaatgagaggcagagctctcctcccttctcctggatgcactatcttcctgtgctttggagtcacagatgtctctgtcacccattaagttttgtttcttctgctgaggatgtctttccatgtatttggatcgctcctgatatcttagtgccttgtttttgtgttcaagaaatgattgatgaattgaagggaaaccgagtaacatcaggaccctcttagggaatgccatgcccccctatgacctcctggaggatagtattgcagagaactgaggaagaggctggcatcttaaaagtcaggagcataatcactggtactggagatcctcgaaaaacctgcagagaagctgtttgctttctggaatgttgatcccagcttacaagcattacagacaagtaattatgataggttggacatttttacacttggccattgctaatatttttttctttgagttaattccttataccatttgcccattttcccataaattggcatatttatctttttcatatgaacttagattatttgcatagtaaggatattaaccttttatatcatatgtggtgcatgttttcagaataatcacttctaaaggattgttaaagctgttatcctataggcaattgtgggcaaataaggctgttggaagcagaaaaagacaaaacagttattcttttttattttagagcatttggtttataaagcatttcatgtgtttgattcccacaataatcctaagaagtatattagtattttacaaacaaggagattgcagctcgaagtgggcaagtgacatgccctaaatgacaaatgtaagtgtgattttaggactcccagtccagtgctcttgttccacaaaggagtgcttcccctatggagtgggcatttgcaatgggacctttgctgctcagcttctactcacaacagagatgtgatttacacacatgccccagcacaacaacaaagtgctcttttgagttgattaattcaacagatagtgccaaacactgttctctagatgctggggattcaaaaatccctgcctccatggagcttatatttttctgttgcacatgtaatctatattttatgtaatattacccccattttaggactttattattaggaagaagtacaatcagcaccaacaccctgaaattgccctgtattgataacgctatgggctgtgaaatgtgaatgtgaaatgtaatgcagctgcttttggggggaaaaaggctctgattttcttgtattaattaaaattctgtctcctttcaaaaattaatctctagtgtctcttgctgttatctaccttgagaagcagaggcagtgtcaggataggtggttctgggggctcagccaaggtgagagcatccttggctgcagaggtatggcgggggtggagaggtgaagtcatagctgggagaagccaagaatcctatccagaaaggttgcatgtgagaggcagggtgaaggtgttgagggaaaaggaatagagaaatcagtaagtagaactatcaacataaataatcaaaacaaggtactgttttacaagcatttatcctttttaaagcgaactgttgacaattagattgggacttcattaggtgcctttttggatatgaagacaataaccaaatataaaaatgcctccattctctgttcaagttttcacacatgaaatttctggttgaccaagttcttaggtaactgaaacatccttgtagctcctcagccatgctctaacttagtataggtaaatcttctaacactctgatacctgtatacctatatacctatacacacacacacacacacacacacatatacatctatacatatgtacatatctgtgtatatatacacccatatatgcatacatacacacacattttcacacatgtatatgatgttttctattcatgtgcaaactgcaattcatatactccaggatttgtcccttcatttagtacttaaggaacccagtagatgattgtgccattctctgaatttgccttgcagagtgactacatttaaacttatttcaagaatgttccattttaaaatctagttttatttgttttttagaggaggagataacttctacttagtaaaatataacatgaagtaatgtttaaaaagatggctttttagataggtgaaataagttctggtgttctattgcacagtaggtgatgatggttaacagtaaggcattatatattacaaagtagcttgaagagaggcttttaattgttctcaccacaaagaaatgatacatgcatgaagtgatggatatgctaaataccctgatttaatcattaaacaacatatttatgtatcgaaacatcagattgtaccccataaatatgtacaattacaatgtgccaattaaaaaataaaaacaaatgaaaaaaatttaaaaagatggctttgctaagagacagacctggatttaatgttccagtctgctactaagctccgaagtgtacatattcacttagatatcccttaggtgtcttaagcttaggatgccccaaacagaattcattctttaacttcttttcctcatcactaaacacactctctattctttctatattctctggttttcttttactctttctgtgattcttttatcacatttgttatccaagatagaaacctgagttaatcctggtatcttctcctcacttattctctgggcctaattgctcatcaagacctactgattaagtttcataaaactatgtcctggactatagcaattgtctttttaaatgttctccctgctgtaatgcagcctgctattcatgagaaaacagtctttacaaaccagacatttaattatagaatttgtataccttagttatttataatgggatcccattgcctaaacgatagaatcacttatgtattcacttaaccagttttcaatagatgttgagcttctgtgtgccaggcagtattctagatgttaggaatacagcagggaacaaaacaaaaatccctgccctcataaaagttgctttccagtatggggagagtctaaggacatatattctgatttaggtaaatgaaaagacaaaccctgctcttgaaaaggaatacttcaaattacaaagatgtctgctttctccactttagtctttaatgtgatattgataaatgtaaacaatgtttttactaaattatattaaaatttatctgaaaatgtaaatgtataagagtagccaagacatttccttaaagaacaatgaggaacaggaactttttatatagggagtaaaatatattctaaagctacaataattgaaatgatgtgatataatataggaatacaggaaccaaatatatatatatatacacacacacacacgacatatattgtgtatgtgtgtgtatatatatgaatttacagtatatataagtgtaaagtgtcatttcaaatcattgaaaacgaatcattcagtgaattgtgtgactggctagttacttggcaggacaaaaattgagttggagccccatcttatatcttatatcaaaataaattgcaggtggagctagtacatgcattttaaaaattaaatcataaaaggattcaaagaaaacacagacaatttaaaaacttcaagggagaagacctttctaagcattatgcaaatcaataagccataaaggaaataattgatatgtttgaatttgtaaaaataaaaatacactgaccactataatttattaataacttccaaaaacaaatgagttagttttaaattttagattgattatatagaggattcaggaaggtgataaaaagatgattgataagtaataagattgtaataaagctctagttccagacagaaaatgaggatttcaagcactgatggctgaaatgtaaggtgaaaaccagctgaagattttaagtggtaaaatagtcaggagatgatgaatgactggctgtaagcagtagggaagatcacctagtatatgatcccaagattcagttgcaaatgttttggagaactttggttccatttactgacatgaataatagaagaagaaaaaagctcttattctgagagaaaggtttgtttaattttagacttagaaagtttgaagttcaagaggcctggacaagtagataggatcatccaatatctgtgtcttaagaaaagagggaggaaagatatgatacactatcagaacacaatagagaaaatggtacaaatacataaggttatccatggaggggaggtagagaagaaaaaacagccacagatagaggtttctagaaacaccatttaagagaatattaagattttcaaaaagacataccagaaacatcacatcatagaggatgaagaagtacagggtttcaaaaaggaatgagaagaccccaagtgctgaatgagtcatagagatccaatacacagttgactaaaaaatagctgttgaagctggcaatgtggaggacgtgtctgtcttttttttttttaactttttttttgaaataattatagaatcaacaggaagttgtaaaaaattacagggaggtcctatgtattcttctcccagtttcccccagtggtaacatcttgcataactgtagcacaataccaaaaccagaaaattgacactggtgcaatccatagagcttcagatttcaccagtttcacatacactcatttgtgtgtgtagttccatgtaattttatcacgtgtaaatttgcataaccactgccacaatcaagatacagaactgtcctatcaccataagaccccttgtgctaccctttatagccacatctactatcctctacccttgccaacacattcttctaattttgtcatttcaagaatgttaaataaatggaatcataggatagaaaactttttgaaattgacctttcttcacttagcataattgccttgaagtctatccaggttttccatgtatcagttgttcattcctttttatttctgaatagtattccatggtatggatataccacggtttgtttccatgcactccttggaggacatgtgaatttttttcagtttgggttactacaagtaaggctgctatgaagaacatttgtgtacaggtttttgtgtgaacataaattttcctttctctgggaaaaaatgctcaagagtgcagtcgctgggccatatggtaagtgcatgtttagttttataagaaactgcctacctgtcttccagagtggctgttccattttacattcttgctagcaatgcatgagacttctggtttttccatattcttacctgtgggcttagaaaattaaataatatacaatgaacattaataagtatcttattaattaacaaatttatctcgaagttataagacaataatgtagacccaggctgggcatggtgactcatgcctgtaatcccagcactttgagaggttgaggcaggaggattgcttgagcccaggagtttgagactagcctgggcaacaacgcgagactcagtctcttttaaaaaaaaaaattagctgggtgtggtggcatgtgcctgtagtcccagctattcaggaggctgaagcaggaggatcacttgaacccaggaggtcgaggctgcagtgagctgtgtttgtgccactacattccagcctgggcaacaaagtgagaccctgtctcaaaaaaaattataataaggtagaccaataattattaaatcatgtttttaaaattatggaccagtaagttctcaggaaaaaaataaacaacaaaactaacattggttgggtagaaaagttgaatacagagttaataacttttaattttagcagttaaagactttaaaacaaatagattaatcacaaaaactcaactgctagcttcactcaccatcaattcattaaagaaaaggtccaaattaatgttctttgttttgcaagacctctcaaagctttgctgcaacctacttttctagcctcaattcaacgattcctctgccttagcctggccacacggctcactgttcccggatttcccaggtaatcacttctttggctagaaataaccaacccccacagccacttccacccactgctgtatttgactggggaactctgactcatccttccaggtcaagtttcttcatctgggttcccattgcactatatatactcctctattagagcactcgttacgttattttatagttatttgtggaggtctttgtccctttcacaggattacgaagaagggcatcatggtgagttcactttcttttccccagcatttagcaagcataattaacaagcacacagtaagctcccagtaaatggcctcaagtgaacaaatcaaaggccaacttcctgtttgtgatgtctgtattcatcagaaattttcctgagattttgagcattgttttcagtgtgcataattcccctgaaacccaagtttaatattagctgaagagcagagcacaaggcacttgtagtaggactccaagaagtgtgccactccaagaacgtctccattacatcgagaaagagggaatatttgttatcagcatgatggacatgatcccagtgtaattgttgctgttgtgaaggccttttgaatggttttccctctccccatgataatttatctcctacattcacttcactatagctttgataccaaaatcttgggcttttccagattagaaaaaaatatgtttttgtttaaacttgtctctttttctggtctatagaacctcataataattggctttgccacatggaaatttgtaataacattagagccccacatcattctgaggttatagtccatagtcgaggccctataattagacatgttttctgtgcacttgcagacacgtatacactgaggtggctgaaataatacctcccaatttccccggctgataatcagagtctttacaatttggttatatactgggtgcttggcatttctagctgttaagttgagaagctgttagagttgtagttgaattaaaagttattttccccttggtgtcaagtgtatcactacattctcaacacttaattatcgttgtgtcccaaaatattcttcatttagcaaaatattgaaattactctttcctgttgaagaagctaactctactatgcaagagagcactgagatgccgtgttccacagagaacccaggaaatgaatggcatttgagggcatttggggcaactggaggagccccaaaacctgttaaaggggccacatattcttacctatattagactcaacttgatagctaatctttttagcagctgacacgtcctcaggctgaagctgaccagaccaaaagaggcctccccaccctcggcagagttgactgaaatggcattaaagtaggacatgacttcccttccccatgcccccaccccactaccttttgtgctgttcacagagaagtttctcctccatcctcttgtccctgtgttttcacattgtatgttctatttagatcaaggtacccagtgaccaaatataatatgaggaagggatgatctaattatgagcaattaataccttagtgagcaagagctgaaggaggaaggtacagactaattttttaaagtaaaaggtggtaagggggagaaatacttctttgatcacttactaaaatatctaatcacaaacatttattcatttattattattgttattattgagacacggtcttgctctgtcacccatgctggagtgcagcggtgcagtcatagctcactgtagcctcgacctcccaggtttaagggattctcccacctcaaccttcccagtagctgggactacaggtgcatatcaccacacctggctaattttttgtagaggtgggatctcactttgttgcccaggctggtctcaaactcctcagctcaagcaatcttcctgccttggcctcccaaagtgctgggattacaggcgtgatctactgcgtccagccaccaaacatttgttaagcaccaatatgtcaggcactctgagtttgatagtgaacaagaagatgcagtcccttgctcttatgaactttatttttctcatggctgagacagaaaacaagcaagcaaataacacaaataatgggaaatgttatgaagaaaatgagcaggctttggatagcaactttgattcctgtcttagaaagaaaaaacaatcagacttgagagaattgctgccagacttctacagcctgcattgatctgaccccgtgtgattctatggatatgcttccctcacctgacataacggctcccacactatttccctacaggagaaatgatgcttgtgtttctctagtggccagtgtcagttactctgaagatgtgatttaccaaccaactgggctaaacaaacaaacaaacaaacaaaaaccggagcaataggaccttgaatgcataattaacttgtgtggaaggcttcattcttcactcaggggtgttaaaaaggatgcctttgtgagctaaaagcagaactaccatttgacccagcattcccattactgggtatatacctagaggaatataaatcattctactgtaaagacacatgcatgtgaatgttcaccgcagcactatttacaatagcaaagacatggaatcaacttaaatgctcatcagtgacagattggataaagaaaatgtggtacatatactcatggaatattatgcagccataaaaaagaacaagattatgtcatttacaataacatggatgaagctggaggccgttatccttagcaaactaacgcaggaagagaaaaccaaatacctcaagttctcagttataagtgggagctaaatgatgagaattcatgagcacaaagaggagaacaacagacagtggggtctacttgagtgtggagggtgggaggagggagaggagcaaaaaacataactattgggtactaagtttaatacctgggtgatgaaataatctgtacaacaaatgcctgtgacatgagttaacctgtacatgtaccccaaacctaaaataaagtaacttttgaaaaaaaggatgtctttgcattaactagtggggaaagttgccctagtggattaagtaacttaatatttcttccaaaggtaatgatctggaaaccaagactgtgcttttattgatatcttcaccttctaaattccctctgtaaacacctatgaataggagggaagaaaggacctaaagtggtcagagggaacctcgaggccaaggccaagttgtatcccagactgtctggctccagagaggaaggtcttccttcagtcattcatttctggccccctttcctctgcactaccctcagaaacagtagcagatacctattgcaaggttgcgctgtgctggtcatgttcacagacaatgcaaacattttccctgctttctaggcatttcttatccatatagtctttcaaacctggtcaaggttttctcctggcaaaatttgagaagttggtggcatttgtatttgagatcatgcacctttgctgtcccttagtttaatgttccccttttctcttccctgtccttcggtcagggaggagttatttgttggacttaactagctcacgtatggggttttggcctgggttccctgaaagacgaccccaagaaaagaattggctgcaaaagggagcaagtgagaaaattgaggcagagaaggggaaaaagccaaagagttatgtgttaattgagagggttgtcagtatgaactgctgaggcttaatccactgggaaccctagaaggaaccatgtagaacgtacctcagccctgctccaccaagcaactgggaaactgggacatagatacatgtatctgtatgtttatgtatgtatgtatatgagtatgtgtgtgtgtgtgtgtgtgtatttttcccccatccatcaatccctgtccatccttgagtgatgacactttggggctgccctgtttgtggacttaacagtgcctggagaaattccgtaggtggagaagcaggaagatgtaagcactcaaagtgggcactgtcacatacctgtgtgagtgtttaagtcctgtccactgcagctgcagaacccagaggtggcccgaggggatatggggtggcatccagagcatatgctcttgctccacattcaaggagtagatcattcattcaacatttgtggagcacctactatgtgccaggaacagcttttccaaggtgagtgagttagaagaagcagagtgacaacagaattcaggactagagtgagccggagagcagatggtccactgcccagaaagaggacatcccttatagggccagcggatggaagccatgggctgggcaggacattcctgtcccaacccacatggcagctagagtcctggaaattacagtcgacatgaccccacccctctcctgaaacacagtttcctcctcccaaccccacccagcagtgcacaccccaacacccgctctgccagctctcgttcgttgcctctttctcctcaatataaccaccattttattttatcccagctcccagcgtgcatttgtcctgcacagccttgctgcccttcaccctgctcctcagtgtagagtaccatgttcccgttattattgttcagttccccagccacacagctaatcctgttagggccaatttaggcaatacaagagtctggagcttttatgacctaagcagttggggctctccttatgctaccaatgataaatgatagaataagtaagcagagggctgggcgcggtggctcatgcctataatcctagcaccttgagaggccaaggcgggcggatcacgaggtcaggagatcgagaccatcctggctaacacggtaaaaccccgtctctactaaaaatacaaaaaaaaaaaaaaaaaaaattagccaggcatggcagcgtgcgcctctagtcccagctgctggggaggctgaggcagcagaatggcgtgaacctgggaggcggagcttgcagtgagccgagatcgcgccactgtgcactccagtgtgggtgacagagcaagactccatctcaaaaaaaaaaaaaaaaaaaaaaaagaataagcagagtctcaattaaaatactcattgatcatgtctgatgtcacagagtttaatcttaaattcagtagacccataaattaaaaatactggatctcagtagccagagggtcattctgtcttagagcccctggacacagtccccctaatatggaccaggcctcatctgaatgttccatgccccctcagctgcgaattcccatgttttctgggccagttatctgacctcttcctgcgagggcagtgcagcaggggtgtgggctctcagggggacagagggactctgccacaggcttgacctgaccatctctctcaagtctctctctacaccccagcacagagagagcagaggtctgcagagtgccacccctctagcagctctgtggaccaaacaagcatttcacctgcaggtgccagctcagcgtgccagggcatgagtgtcccccaggtggcagggtgactgcctttcttaggtggcttatgttcagtgtggaagttcaggctctctcattcctgtttcgattccttttccctctctgtctcacctggtctttgatagcaaaggttagtgttataattaaacaatcaatttagcaaattttctttggggatttcctttccttttgttttgccaactgtaattcctccagtctccagagagatcccctgtgaagtgcatctgaggtgttttcactttccctcatccacagttgttgttgttttcagggactaacaaatgacaaataagacacagcatgttcgtggtttatataagcaggaaggaatatatctgcttctctctgcaggaagagaggaggaggaaaagaggaggaggcacagctgatggctgctacccaaggccttgctccgaaacatcatgggtgactgggagtctaagaatattaattggagacagtgggaacaggggtaatttcacgtacccagtagggacatgctgtgctaagagcgtgtgagaaaatagcgtgtgagaaaaaatttacctgatggtgctgctataggtcttattttcttccatgttttgtttcttatgcaaaacgtatatgtgttaagagaaggggatggggaaggagagttcatggaggagagaagaggaggagaaataaactttgaaaattctagttgccatgacaacataatgagctccaaaagtggcatctctgaaccagttttgcatgggaaggcagagaagctcaaaagggaaagaattaaaataataaaaataataaaacagtgatcatgaagcaaaggatacatctgaagaggctgtgagcccttcttgtcaccctctgtgtgttgggagtgtcaaagctgcttgctcctggctgacctgggcagagcctgcgggattgccgtcaggggttggaatgcctttgcagcctcccgggctctggacaatgcgcagctaagggattttgacaaaaaagacctcatgcattgtgtgtgaagtgcattgtgcttgagaacccattgcaagccaggctgtcttcctgctccgtttctcctccctttcctccctcccacccgccctttcttatagctcagctttactcttttcaatgaatttcactgtagcccaagcgacagtgtgtgctgtgtcactcttaccaccatggtatagaatgtaaaatccccattattgggcactcgttagaactataaggctcttctccccagcaaagtgtcccagagctgtgcgaggcttatacaaaagaaggaagcattgagaagtgcagaatgtgaaagccaagaaggatttgtaggtaatgatgtttttgcccaccatactcaaattggaaatgcacccacagcatcttagaattatttattattaaaagtgtattttaatgaagatatcccttggtatcccttgtcctggttcaagtcgtgttcatgttttcctcattataatggccaggacgttgcactacatatgtttccataatataatcggtgtttaacagcatctgagccaatccatcagttaaggcacttgttctgagaactggttgaatgtggggatcctgctgcccccttgtgcttgtttgatattgttgcccacgagactatctagggtgtacattatgatgtctctaccaccaagctctgtgtctggcacacagtaattaatatatgttgaatgaatgagtgcttagttccagctgaagcatgaagccctccttagtatatatgtgctccggctagactccaacgaatagctgtttggcaatacatgtcaagttgagtggatgatgtataagtgaactaatatcccctatggaggacagcaattctcagtgaaataagcaaatcattgtgtgagttctgtgtatcagcaaagattaaatctattaagtttttagcttctttcagatgttaaccacttaagtagttaatatttgcataatgcttcctatagtttagaaccattagtcagtgaggggaacctccttttctctgttatatttcttggtggaagaacttcctccagaaaacactttttaggcctttgtcatcatcctttgctcattcctcctgaactgtaatagatggatttagaagaactggctgtgctcctctcagcttcttcctcctctttagaactggccggccctccaggaacgtatcttctctactcccttttgcttgtagcttctgggacagtgccctgtaatagggtaggactgggcttctgtggttgttcctatgactggatggttcaaaattctggggtatacactcaggatagatctagaagatagatgatagatctaaagtcatgttctccaacttgctttatcagaaatgaaactgattattttttgtctttatttatctaactccagtatgtcccgtgtctcagctggtttcataatcaggaggggaataaaaggaaaattgtatactgatccccacagcactgctatacatgattagaaagtcttttccccctttaaacatgtaattttaaatgatacaatacaatctcagatgtgatttttgtcaccttcaagacatccagcaattctagcaccttagatatttatatcgcaggtcagttggaaaagagtagtcacaaaacacaaattatgttcatagtacacttggctagtgtgcaatttcctgatcaccaaacacaggagaattcaaaagaagtatgaaacctggtcctttgtcttgggggcttatttcctcccacagaaagctgaaacctgccacatcttttcatatgggtgatccctgaaataggcattctgggctggagataccactgtggtttctatcatgtaagagcagttttgtagaagaggtgagatttgaacagggctttgaaaggtagctggaacttatataagcccaggggtgtcatagagtgggttttgggggagaagttttaggaataacaggatgatccccaactttgaggcaggccctaatttatttgtgggataaaaacgatattgaatatgagagtggtgggaacatcattggtttagttaggtctggttagatcatggaggacctcacagcagagggaattaaggcaggagagttactgtgggtgctggatggagggggcaggatgaccatgcgggacatagtatttggggaagattagcttgcaggcctgttctgtggatgaggacacttgcttgtctgggttctctgctgcctcttcaactttaatcttctaggaactctgagtggccccagcatgagggctctagtggtgcccctctgccagccactctgaactgtggcagacttgcccagcacagaagttaggataggctgtctctaaaagaggactgagagagtgtttattctacccagaccatggctttgagattggatatcaggatgcatgttatttttttaaaagagcttttttgttgttatcttctagataaatgagaaatcagaaacaaagtcaccattcacctgaaaaggcaccactgtctgggagcagtagcaatgggctatatataataacaataatgataataaaacaggtactgtttataaagtgttaaccgcctgttagaacttttcttattgtattgctgcacatctatctaacatgtatgtatctaacaaggacatactgaactaacaaggacacactgaatactggtattaggatttgaaaaggctggggtaaatacagacatacaaaaacaaccctgatttgaaggttttggaaggacctcttaggaaaagagggaggcaatttagcattgttttggattacggggctcaaatcctcattcttcatttaattagctgtgtcaccttgggcacattttctaacctttctcagacttagtttctccacctggaaagtggggatcataatatttcatggagtttttgttgattaaatgatgtaatgaatacaaagaacttagcacagtgcctggcacataagagatgttcagtaacacataactattaagaacctcttaaactagcctcctgtgaaacatgaattttctattattcatttttatctttgagttaaggctttttaagagcctctagataactacaaatatgatatctggtgaaagttccacattttcttcctcatggtctttcacacctttgcatgacgcacttactggcacctaaggatgacagagtcccaggagagaggtactcagacaggacagagtcattttaatagatagggagtagagttgtaaacgatgaagaaatctggaaaagaatagccggaaagttaacaaaatgtattggataactacaatgtgctaggttttgtatattatctcttccttacaacaattcagtatgacaggctgtgtttctccatattacccatggtggaatgtgaactgcaggagccttgcatacttccccaaggatccccagttagtaaattggggactaggatttttcacttgggtctctcttaatccaaagctcacgtgctttgtcctacactctgctgcccctcggaaaatgcacagagcaaaggtcctattagaagaaggcaaactcgggccagagctcctgggcagccagggggcagataaggacataatgccagggagctccatgtaaacacgtgaaagagggaaatgggccacaaggtatcctttcacaaacggttacttccagtgtccttagagctggcttggtctcaggaggacagagaggccacactcacaaggcatattacccatcaggatggcactgcagtgatgggattctgagatctttgtcctcctcctgtcagtggctgggctaacagcaggccaggctggacagtggcctgggaacatagggcaggcaggcaacctgttacttgccatagaagtgtgcagaattgacaaatccatgttcagaagggcatcaaagtccgggtgaggctgatcttctaaagttaagtccacctgtaattccagtgctttgggaggctgagcggggagaatcacttgagcagactgggcaacattgtggaacctcattttgacaacaaactttaaaaataaaaaatattagcagagcatggtggtgtgtacctatagtcctagctactcgggaggctgagacaggcaggttgcttgagcccaggagttcaaggctgcagtggttgcatcactgaagtccagcctgcatgacagagtgagaccttgtctcaaaaaaaaaaaaaaaaaaaaaaaaaaaagagtccccaatctcagcagctagacagagagcaagagtcaagacccaggagaaaccagtgggtggaagggaagcagtgaatgaggggaatcaaaatgggcatttgggagatgtcactagaggtattccctgggcagagaatgggctgttagtgtggttcctatgtccttcttgtgacagtggctaggcactttcaaggagccaggtctgacgtgctatgatgcatgagcctccaaccattagggtgaaggatgtgatctggggtgagagcacaagccaatgatgtgacaaccacatgggcctgagtgagtgaaaactgccacagtgagcagcgtgtaggctgccaacccacagggccgggaaagtcaagaactgtgtgttccacccgcacatgttctctcatgcacatgccgaccagcccagcccaccctgcttctcacacgccctgcctccggaaacgaagagccaaaaagggaaaacctcccgagagtgctttttacatcttgccagacatcggtccacgcagcagcacacttcaccacaccccatccctgtcctcagttatcctctgtgttcccagtcagtggtctctcagccttgaagctctttcacctccttggggcgcttgaaaacgttggccagttccttgagaccttccttctcccctagatttctcatttctcacttcctatgtgtctgaccactccctcccagcatcagtaggagaaaccttcagccctgttgccataggtgctaggtcagagttgcttcccaggtgtcacacagggactcaggctgaggaatactccattgtctgccaatgctaccttttcaacaagtacccgtgcagtcgccctggaagaagggaaaggctgcagagggagcactgtcagttaaatgctttagggcggtgtgtgacagttctactgacgtttcattaggaaatgagtcacgtggccgtgcctcccctcaagggtgaagaacagttgaggagaactggatgtgttctttttctctgggttctgggtggttctccacagggagctgttctgagcgtgattgcctaccactgctctaagccttctgtgtccttgtgaccctcagatccatgtccccaacttctgcctctcctgtgctgcaaagccgtattttcaactgtgtggtagattcaaatgaagtacttcaagcttagcatcccacaaaccaaattaatttcccctaccaaaaacccacttggccatcttggggggcctctggaattcctggagcatccttatctggtctgcaaattcccttttattctgtgaaatgtctgttgctctccccatcctcctgtttatttccagtatccttgatcctgtcacacccaggtttctgccatagcctaccaaatggtgtcccttcctcctctttagtttttggcaaaaacatagctattttcctaaaaatagacctaatcatgttactcccttatgtaaaaaccttagactatttcctacaacccacagaatgaagtaaatcacatcaagtcattgggggaatggggttgtatttgaacagaaccagacaaggatctgaatgctggtctaccacctaccagctgtgagtaagttatttaacttcattgactctgtttttcaatctataaaagggagataatgatacctacctcacagggttgcctttattttttgctgtgttctgtgcctatcatctggttggctgggggctttgggcaagtcattttcttcctctacaaccagggatggggaagcagcttctctctgacctcatcacttcctactctcttgcctacttctcttcagccacactttctataactgtgaaaggggaaagagaagctctggaggtccttaccctggcaatgcaatatttgcccttaaatgtatttgccagaactggtcatgtggccacatccaatgttgggggccaagaaggctgggagccaaaagtattatgtgagcagcgttaatgactatccgattaacgatgaccccatagtgggtatagacccttgccctttggagtgcctcttgcctggtcaaggtctgacactgggaccccgtgtgaccatagttcagttgactttgtcagatttttcttagcttccttccaaagaggatgggatacacaatacttttaagtacatttaggacttgatgataaaaactgaccctccaagatgctctaactagaaggaatgctgactatcttcttgtcagttttgcttatcacaggtgaggaaaccggaggaccaagaagggtgagacattcccgccaagctggttgctggcatctcagactcagtatggccacctctgaactctcattgtccctcccagcaaatcccaccctccagcctatatttcctcaatggctggttgtattagtctgttctcacattgctataaaaaaatacccgagactgggtagtttatgtagaaaagaggtttaattggcatatggttccgcagactgtgcagtaagcatgattctggtatctgctgaacttctggggaggcctcaagaaacttacaattgtggcagaagttaaagcaggagctggcacgtcttacatggcaggagcagtaggaagagagtgagtgagtggggaggtgctacacacttttaaacaaccagatctcatgagaacttactatcacaagagcagcaccgaggggatgctgctaaatcattcatgagaagtacctccatgatccggtcaccttccaccaggccccacctccagtgttggggattacagcttgacatgagatttgggcgggaacacagatccaaaccatatcactggtgttgccattgatctctacttgtcctttaacatgcagtgtcctcttccatgaataccttccccagttccttccatagaattggagcccctcccctccctatgttatccatgtcccatttatggcatatgacgttttatattggtttacttgtctggctccttggtagataagattgacttgagtacagcaagggcatcttatgcatcttatgcatctttgcattttccagtctagcaagtggcactttatgcaatggcactggatagaattcttgtctgaattattggaaaagaaccagttcccacaggttcaacaacaggcagtggaagagttggaacttctgatttttgttctcagtcacttactactgaattgcatttagcttacagtttttcagtctcctgcagcattgtgttccatgctcttatgcttgggtttaagagacttttttaagatcagattttatttctttcttcttttattttaggttcaaggaggtacgtgtgcaagtttgttacataggtaaattgcatgtcactgaggtttggtgtacaaatgatttcatcacccagatagtgaccatagtacccaatagggagtttatcattcctcactctcctctgatcttcatcctcaagttggccctgatatctattgttaacctatttctgtccatgtgtactcaatgtttagttccctcttataaatgagaacatgcagtatttggttttctgtttctgcatgaagtcacttaggataatgtcctccaactgcaacatgttgctgcaaaggacatgatttcattcttttttgtgtctgcatactattccatggtgtatatgcaccacaatttctttatgcagtccactgttgatgggcatctaggttgatttcatgtctttcctgttgtaaatagtgctgcaatgaacatatgtatgcctgtgtttttatcgtagaacaatttatattcctttgggtatatatacagattgctccttcaggccaggctctaggggaaatatgacaatgacttgatcaggtttgctaggtcaaatggtagttctgttttaaattctttgagaaatctccaaactgctttccacagtggctgaactgatttacattctcatcaacagtgtatacgcgttcccttttctctgcaactttgtcaaatctcttattttttgacttttaataatggccattatgactggtgtgagatggtatctcattgtggttttgatttgcgtttctctaatgattagtgatgttgaacattttttcatatgctttgttggccatgtgtatgtcttcttttgaggagtgcttgttcatgtcttttgtccatttttaaagggcttgtttggttttcactgttgatttaagtttcttatagattctggatattagatctttgttggatacatagattgcaaatattttctcccactctgtaggttgtctgtttattcttttgttagtttcttttgctgtgcagaagctctttcatttaattaggtcctacttgtcaatttttgtttttgttgcaattgcttttagagtctacatcatgaaatctttgccaaggccaatgtccagaatggtatttcctaggttttctcctagggttttcatagttttaagtttttcatttaagtctttaatccattttgagttgttttttgtgtatggtgaaaggaaggggtccagtttcaatcttttgcatatggctaaccagctatcccagcaccgtttattgaatatggagtctttccctattgcttcttattgtcaactttctctcttgtcttcatttggtttgctgatttgctttgtttcatgtttggtgataatgccatattcccattcaagatggatgttcttcctaaataaaggattttttaaatcctttttttttttttttgccttgttagtgacatgctacagaaaataaacagggtaattctgatttgtgattggacagcctttgaattaaaggagtacatatggctttggggggcttaatatattgtaaagactgagttactcttgagattctctgtaagtttttcaaactgtaaagtggctgacatttgaaagtattatatgtaacatccagcatcatgtctgctgcatagtatatactaattaggagaatttgatgaacaaatggagaagttttcctcccaggagcatgcttacaaaggaaacatttttttttttttttttgccttgcctaggtagcacatagcccacctttaagtttttttttttttttttttgagacggaattaagtttttaaatgatttttatatgtgttatttcatgtcctcataacaagttgttgtgcaaccatatatattatacctctcaagtcaagtattatgttatgaatgccttgtacaagtgttgagggaaccgagttggaatgtgaataactaacccagtgtggtctatcttctgccagtaacagtttcattgcacaatcttccttactggaggtcagtcaccttaccccactgacttggcccctcttggagtatctcctttttacttttggaaggttctcagaactttctcaataatatttcaaattgccatgttttggccaggtgttttcagttgtgtaaatcttaaacccatttctggaagatgttctcagtcctggtctcacctattcaataaacttaaagtttctgctatgagttaagtgctctgttaattttggtggggaaagcacaaacagacctattgttaaggcacactctcaaactttgtctggaagaccttttggaatacttcacctatatctcatagttttattatttctggtttctcaatacttactcatttgtaccccacttgtttcctatgttgtatataaaatgaccctgtcctttatattttttatctcctgcatcctagttctctaagttttacttcctgaaagcaatcaaatgcaactaacattgggtttcatttgagttagacctgtagagtgcttgggctagaaaggctctcagggagcactttgcagttaaaatgaagccacccccacccgcccccactctctgcctccccagggtagtcttgaccaagacctagagacagtgaggggtagattagggccagaatccaggcccctgactcctagtcagtaccctatgtctacctatccttgtccggtgaaccttttgatatttgatttccatccttgttatccctttttctttatttgatgctaagctattgtcatcattcctcattagatccaattacagaggcttggaggccagtaagaaccaagttttttttttttttttttttttttttttgagatggagtttcactcttgttgcccaggctggagtgcaatgatgcgatcttggctcactgcaacctctacttcctgggttcaagcgattctcctgcctcagcctcccgagtagctgggattacaggcatgcgccaccatgcctggctaattttgtgtttttagtagagatggggtttctccatgtttggtcaggctggtctcgaactcctgacctcaggtgatctgcctgcagcagcctcccaaagtgctgggattacaggtgtgagccactgcgcctggccagagccaagttttttaagggatggcttcacgtctgagttttggcctttcacactgacttgctatggctggtagcaaggtgatgaggctcttttaatcttcatagatatccagataatacagcttggatcactgatagtaggaattacaaggccctcctaatccagtgaggacatggtgttcagaggccaagacatggtggggatgcttgcagcaccttcatgtgaagagtttccctgcatggaggtgtttggaaaacaggcttgtgggtgaggggcaaagagagttctaaaaagactgcattgaccttttggatttttctgtagctcacctcaaagacaggcagagatcctgggtgacatgtggtgccaatttttattgtattcctactggctctgtagatattgtcttttgttatgtccttggcaagagaaatgtgattgatgtgattgggaacatgagactggtggggtgggggtggttctcaagctccccataattcacagatttcaagagaggagcacagaaggacttcatttgaagggaggaatgaaccatctaacctccagtggcagatgggagccgagaccctggagtcattggggcagcagttgcctgagcaaggggaataacagcagtttcccaccaaaagtcttctattgggattttcatgttttctgtcctgccttttaatgttttttaatgaacaataggatctatgactctttatgccttggggagtcactcaggacaagtttcatacccccacttggagttgggattattatttactgatttagacagcttggggggctgtcaccacacttcttctgtcttgtccagttcacccctcagctggctaagtctgagaaggtgttacacgcacagctcaggaagaaggcatgcctaagtttctaactaagtgaatgcaaggcagctgggtctgagagccccagaggctcacctctgcacatggtgagggaaaaataaagatggcttctgagtgattttatgacttttgaaagaaggggcattgggacaaataaaaggatacagccaatggacacgcagttctttggactggaagaaaaattataacctgtttgcttttagggtcattgtattcatctacaatagtatatggtttgttacagattccagggcattttccatatatatattttattttttttcctactataactttaaaagacattatttcccccattatttcaattaataaacaaaggcttattgatgatttaactagaatcacatagaatatgccagagtcagaacttgaaaccacctttattccttctggctcagtgttttttctcttattattcaatataactcaattccctcataaccatgaagcattgtgttttcgtgacttatggttcattgacttccaaacatcattttgtctgaaatatttcatatacacaaaagaatatatatatattacatatggtttgttccatatatgtgggacaaatgaaaatgaaatgagtatctgggcactaacaataaagcttaagtgatagaacattactgatgccagggaaacccaattgcctttcctgcaactctcgccctcccactcaagggtagtatttattatccctttgcttatcatttagttttaccacttgtgtatatttccctatgcaatatatcgctaaatgttatatgaattgtaaaatacagtgtatgtttttatagaggttggttcattcacttcactttcgctgctgagcagaattctacacagcagaagtgtaagtgtattgcaagttatcccctctccacttctagaattttgctaatgcaagtgacattgctatgaagattctggaaattttctggggctataggacatttgcatgcttaactctgcaagataatgcccaattgctcttttcccctatcctttttaagttataattgacaaaatttttacatatttacaaggtacaaagtgatgttttgatatatgtatatattgtgaaatgtttaaatcaagctaattagtctatcacctcaaatacttatcatttatttgtggtaagaacatttgctatctactctcagtaattgtcaaatatacaatacattgatattaattagtcaccatgctatataatagacctccagaatttatcctgtttaactgcaatttttaccatttggctaacatctctccatttccccttcccactccagcacctggtaaccagcaggtgctgctggtctactccttgcttctatgagttctacttttttagattccacatataaatgagataatgcaatatttgtcttcttgtgcttagcttattctatttagcataatgtctttgaggttcacttatgttgtcatgaatgacagaattttgatttttttaactttaagttctgagatacatgtgcagaatgtgtaggtttgttacataggtatacacatgacatggtggtttgctgcgcccatcaacccatcatctacattaggtatttctcctaatgctatccctcccctacccgccccctgattccttgacaggccccggtgtgtgatgttcccctccctgtatccatgtgttctcattgttcaactcccacttaggagtgagaacatgcagtgtttggttttctgttcttgtgttagtttgctgagaatgatggtttccagcttcatccatgtccctgcaaaggacatgaactcatccttttttgtggccacatagtattccacgatgtatatgtgccacattttctttatccagtctatcattgatgggcatttgagttggttccaagtctttgctattgtgaatagtgctgcagtaaacatgtgtgcatatatctttatagtagaatgatttataatcctttgggtatatacccagtaatgagattgctgggtcaaatggtatttctggttctagatccttgaggaattgccacactgtcttccacaagaattgaactaattgacagttccaccaacactgtaaaagcattcctgttcctccacatcctctccagcacctgttgtttcctgactttaataattgccattctaactggcatgagatggtatctaattgtggttttgatttgtatttatctaatgactagtgatgatgagctttttttcatatgtttcttggtcatataaatgtcttcttttgagaagtgtctgttcatatcctttggtcatttttttatggggttgttttttttcttgtaaatttgtttaagttctttgtagattctggatattagccctttgtcaaatggatagattgccaaagttttctcctattctgtaagttgcctgttcactctgatgatagtttcttttgctgtgcaggaactctttagtttgattagatcacgttggtcaattttggcttttgttgccattgcttttggtgttttagtcgtgaagtctttgctcatgcctgtgtcctgaatggtattgcccaggttttcttatggggtttttatggtttggggtcttacgtttaagtctttcatccatcttgagttaatttttgtataaggtgtaaggaaggggtccagtttcagttttctgcatatgactagccagttttcccaacatcatttattaaatagggaatcctttccccattgcttgtttttgtcagatttgtcaaagatcagatggttgtagatgtgtggcattatttctgaggcctctgttctgttccattggtctatatatctgttttggtaccagtaccatgctgttttggttactgtagccttatagtatagtttgaagtcaggtagcatgatgcctctagctttgttctttttgtttagaattgtcttggctataagggctcttttttggttccatatgtaatttaaagtagttttttccaattctgtgaagaaagtcaatggtagcttgatggggatagcattgaatctgtaaattattttgggcagtatggccattttcatgatactgattcttcccatccaagagcatggaatatttttccatttgtttgtgtcctctcttatttccttgagcagtggtttgtagttctccttgaagaggtccttcacatcccttgtaagttgtattcctaggtattttattatttttgtagtaattgtgaatgggaggtcactcatgatttggctctctgtctattattggtgtataggaatgcttgtgatttttgcacattgattttgtatcctgagactttgttctagttttttttaatcaagtattttggattttctacatagacgacttctttaaatttcttaggcttctttaaagactttatcttggtgttatggagtttactctaatggtgctagttatgggtttccttttagctatcctgcttttatatgcattgtgctcactgcatctatgtatctgaatatttcattcttgaaaaatcaaatattatcttttcaaatattttctctcatcatttgtctcttctcattttatgaaactctgacttgacttatttaagatcttcaacctaacatttctattagcctcactttcagttttctcatctctttatttctatgcactgcattaaaaatatatatgtgtatatatatatttatttagttctttgattttatttatcagagttttgtagttttccttatgtagatattgtacatatttggtcagatttttacttatttaatttttttaggtactacattttacatacattttctgttctgctatctgctctgtcctgtaacctatctttgaaatttaaattttaaagaaaaaacaacacaaatgatcaaaatctggaatgaaaagggtggcatcactatagatcctacagaaatcagataattaaggttatattatgaataatgttgtgccagtaaattcaataacttggataaaatggcaagtttcttgaaaaccaaaataccaaaacattgccaaaaaaccatatgatcatcttaatagatacagaaaaagcctttgataaaatccaacattgctttataataaaaaccctcaacaaactagacatcaaagaaacatacctcaaaataataagagccagctgtgacaaactcacagccaacatcatactgaatgggcaaaagctggaagcattcctcttgagaactgatacaagacaaggatgcccactctcaccacttctactgaacatactactggaagtcctacctggaataatcaggtaagagaaagaaatgaaaggtattcaaataggaaaagaagtcaaactatctctctttgctaacaataacaattctacatctagaaaactctaaagacttcacgaaaagtttcctggaactgatgaacaacttcagtgaagtttcaggatacaaaatccatataaaattcagtagcatttctatacatcagtagtgttcaaactgagagccaaatcaagaacacaatcccctttacaatggccacaaaaaataaatacctagcaatacatctgccaaggagatgaaagatctctaccaacaagaaaaactataaaacactgctgaaagaaatcatagatgacacaaaaaactggaaaaatattttatgctcatgaattggaagagtcagtattgttaaaatggccatactgcccaaagcaacactatttcaatcaaactacaaatgtcacttttcacagaattagaaaaaactattctaaaatttacatggagctaaaaaagggcccaaatagccaaagcaatcctaagtagcaggaacaaagccagtgacatcacactacctgatttcaaactatattataagactacagtaacccaaacagcatggtcttggtacagaaacagaaacatagaccaatgaaacagaatagggaacccaggcataaggctgcaaacctacagccatctgatcttcaacaaagttgacagaattaagcaatggggaaaggaatccctgctcaataaacaatgctgggatagctggttagctagatgcagaaaaatgaaactggacccttacctctcaatatatgcaaacattaagatgaattaaaaatttgaatataagacctcaaactatgagaatccaagaaatacacctaggaaacaccattttggacatcagccttgagaaggatttatgactaagtcctcaaaagcaattgcaataaaaaacaattgacaagtgggacctaattaaactaaagagctctgtatggcaaaagaagttatcaacagagtaaacagacaacctacagaatgagaatgcaaaatatttgcaaactatgcatccaacaaaggtctaatatccagaatctctaggaacataaacaattcaacaagcaaaaaacaaacaaccccattaaaaaatgggcaaaggacatgaaaagcactttttaaaagatacacaagcaaccaacaaatgtgaaaaaaatgctcaacattgctaattattggagaaatacgaatcaaaaccgcaatgagataccatctcacaccagtcagaatggctatctaaagcaaaaaaaaaaaaaaaaaaaaaacaacagatgctagcaaggctgcagagagaagggaatgcttatactctgttggtggtaatgtaaattagttcagcccctgtggaaagcagtttggagatttctcaaagaatttaaaacaaaactagcattcgacccagcaatcccattactgggtatataattccaaagaaaataaattgttctacccaaatgacacatgcacttatatgttcattgcagcactatttacaacagcaaagacatggagtcaatctagatgcccatcaatggtggattggataaagaaaatgtggtacatatacaccatggaatactatatatccataaaaaggaatgacatcatctcctttggagcaacatgaatgcagctggaggccattaacttaagtgaattaatgcaggaacagaaaaccaaatatcaaatgttctcacttataagtgggagctaaataattgggcactcatggacataaagatggcaacaatagacactgggtactactggaggtggtagagggttgaaaaactgttgggcactatagtcactacctgggcaagaggatcattcatatcccacacttcagcatcacacaatatactcatgtaacaaatctgcacatgtaccctctgaatctaaaataaaagttgaaataaagaaaattaccaaaactaagagaagaaatttaaaatctaaataaacacagatctgttaaaggaatttaattcatattctaaaacttcccacaaagaaaactgtaggccacattgttttaccagtcaattctaccaaacgttaaggaagaaataatgctgatccttcacaaacccctttaggatatgaggcaaggggaaaaacacttctcaactcatttgatgtgatcagcataaccccattacttaaacctgacaaatatgtaatgagaaaataacaatgtccattgtgaatgtaaatgcaaatttccttgaaaatattattaaatctggcaaaatataaaggataatatgtcattaccacgtgatgtttaattcgtgaatgcaatgttgatttagcatttgaaaatcagtcaagttaatgtactacattagcagtaaaagagggagaaagcatacagcaccttaatatgtgcaaaaataacttaaaacttactagtcctttataataaagacttgcagtaaattaataatagaaaagaactttctcagtctgatgaaatggcattgctattgtttgaatgtgttttccaaagtttatgtgttataatccccagtgcaacagagttgagaggtgggacccttaagaggtgattaggtcatgacagctctgccctcgtgaatggattaatgccattattgtgggagtgggttcttgataaaaggatgaattcatcccactttcccatgctctgttgcataggctttgccattacacccttctgccatgagatgatgcagcaagaaggcccttgcaagatacaacccgttgatcttggacttctcagccaccagaacaatgagccatgttaattttggtttattgtaaattacccagtctcaagtattctgttatagtggcacaaaatagcttgggacaggcatctataaaaaacctacagccagcatcatacttaatgaaatattaatccctcttccctgtaatctggaaatgggcaaggactttcacttttaccacttgtctttaatgttgttatgtaaatctgagccatattaataaggaaaggaaagaaaataaagggtacataaattggaaaggaaaaaataaaaaccaattttttcacagataacatgattatgtattttgaaaatctaacagtagactctaaactacaagagctaattaagtgaattcagccaggtcacaggatacaaggtcaacatacaaaaattaattgggttatatatgcttgcaatgaccaagttaaatttaaatttaaattaactaaaaatggatgttaaatatttaaggaataacaaaaaaatcaaatatctagaaataaatctgacaaaagatgtcaagacctttctactgaaaactacagaacattgctgaagtaaattagtcttttgaaaaatggagagacatggtatctttatggattgaaaaacttaatattattaagatatccattatctctaaatcaatatggagattaaataaaatccccatcaaaattctagcaggttaatttgaagaactagacagatgattcaaaacttgatatggaaaggcaaaggctttagagaacccagaacaattctaaaaagagaacaaaattgtaggacttattacactacttgattttaagatccactgtaaagctactgtaatcaagacaatatggtattgctgtcaacagacaaatagaccactggaacagattagagagcccctcatgtatattggtggttgatttgtggcaaagatgcaagttcaatttagagggggaaaggaaagtcttttaataaattttgctatatccactgtatattcatataaaaaaagtgaatctacagctgggtgtggtggctcatgcctgtaatcccactttgggaggctgaggtgggcgaatcacttgaggtcaggagttcgagaccagccaacatggcgaaaccccatctctacaaaaaatacaaaaataacccaggtgtggtggtgtctgcctgtagtcccagctactcgggaggctgagacatgacaattgcttgaatccaggaggcggaggttgcagtgagttgagattgcgccactgcactccagcttgggcatcagagctagaccctgtctctaataaataaattaataaataagaatctagaccttcctctctctgtgtagattaaaattaatttgagaatatctttgcgaattcaggcgagacaaatgtttcttggacagaatacaatataaaaagcataaacaatgaaatcaaaacaattaataagttgggctttgtcaaaataaacaatttctgtttatcaaaagatgccattaagaaaatgaatataaacaagacacagactaggagacaatatttacgtaacatatatctttttttttttttgaccttggagatttccatcacttttttgtaagcttaggaatgcattaattatcatgcttgtcaatctagcacttgggtgttttgtgtaaaagttatttcagaacactggtgttttattctgccagagtagaagtcagttctttgacttttcagattctctgcaaaatataacatttttctgagcagcattaggtagaaatatactatagtatcatgtgattaccttatttcacacaaacagaattatataaccaaattctctatagttaccccttcagaagtaaagcctatacttactagtttcccagggaggagtcgttattgcaaaggagtagattaaacctgtggggaaaaaatgttggcctggtgtatctttttaggcatcagccttcctgtaagtggagctgtgaccaggtgtatgtatgcacatgtgtatgcatgtacattttcatgactgcagatgtagacacgtgtatgcacagataatgtttgcagataagatgtattttcagataagaatggagtaatattttaacttgggttcattgtaatgtttggatataagatatctaaaaaaagatcagtgtttattggtagagcgtgattacttgcaaaagaatttgactattttatttatgctagtgacaactagtgtttttcataggaatccatttctagtaattactgtttgataatataagggtaatgtgaatttcctgcttcctgcacataataagaatgtgaatttaatgccttctttatagcctcatttctccactccatagagcaggatgaggaagagatactctgtagtggagttcaggggcttttctgacctcgggtcctatcctttcatctgagtacatcctcagagacaagaggcagaagagaatacagaaggggaaaaataggatgaaaaagaataacaaaagcaggggaggaaacacacaggaagaaagaagaggaaaatacactgaaaagctgtggtgaaatgttgctgatgtaatcctaagggcctcaggtggcacaggtcccctggcttctatttgcctctctagacctatctgtggtcagaagaaccttgttctgtcagtacttagatgtatgatcttgaacagattcttaaacatcctttggcttcatttaaaaagtgagctagtatcaggtattttgtagttttgtgaaaatcaaagcagatagtgcttacaaacttcagcagagcatctggtacatcataaacacaaaataagtggtcattagtatgatgatatcaataccacatcttccagctgcaaaaaatggttttgctccagacagtgcttttcaaactatccgtgtcgaagaattgcttctaaacattaccagtctactgtgtgtttatacttttgtaaaatgcatttgtttataaaaagaattacctgaaaactgaaatgaaaaatataaacagatataaaatacagccatcaatttttattcttacatttggtagacatcaaatatctgtaaaattattgtagaagttactagtgcttttaatttctgaatttatcttatggactggaaatagtttgcagataggcattggtccatggttcacactttgaccgatacttcatacactgctctgtgaagagcagatctactgttgcctataaatacataagggtggactttgctaaggcaagggacttaggagtatttagaagtctatgctggggtgggggttatggtccaagctggaagcttccaccctcgtgcatgtctctgatggctccaaactctggagagtctgctttgaaggaaatcttcacataaaaggtcctatgtaaaaatgtcttctcctgaaggtggtagagttatttagaatctatgaggtgaacagctagagttcagaagttgtctaacagtctacacgtattcagtaacatagactttatcaaaagatgcactctcctcctctctaaacctcaccagtattccttcccttccagtgttgatttgtattatccttgatgcaaatgtctgatttgagttaatatttcaaggtcacaaagtaataagagttgtcaactgacagtactttgtactttaagagagcagctccttaggaatttcagagtccactcttatctgttgaagatctaccatactaggcgccatgactggtgccttggttcacatgggcttgctgatgcagcagctcagtgaagttgcagtttttatcaatgccatttattaggaaattgaacttcagaaagcttcaataacttgcctgtggtctgattcaaagataggtgtaatgagtcccaatacagtttttatttttacaataccacaggtttaatcgtctttcatggcattttgtcactgtcattgtatatgtattgtacgaatcctcatggaaaagtgcatagcctaccacagccctaggcactggagtccatgacaggccagccatctagtaagaaaatgtctttgcttgtatgtcaccagcttttgtttcatttatctctaatagataaggatattttcaataaggtaacaattaattgcattttaatgaagaacttaggttaactgtaagacaggcttaaagaagttggtgatttattaaatatcctcaatttaagaaagacttctaagtaagggatgataacggtcaacttaaatgatactgagactacagagggacaaagtctcaattgcagcagaaaatatttaagctgaatatagtgaagaatttcctgccatgatgttgctttacagctttggaatagtcttgaaagttcatatagagtgtcaaagaataggtgtacagcttgttttcagaaggtcctggtagagaattcttagattgactacattaccagtagatatgatctgcagtggttgtgactcatagaggtaacctccagaagaaagaatatgtacttctgaacgttctgatgcctttatccattcatgcaacaaatattgcttgaattccttctaggcaccaggcattgttctgaggatatgatggtgaacatggcagaagagatccttttattgtgtagcttatattcttgagcaaagacaaaaaaccaaatagctgaacaaggtagcttttagggacagatgttattaatgaaataaacaggttaatgtggtagagtgcagcaggtaatggggccattaattttaattttgtgatcaggaaagttctcccatcccacgccagtggtcgggaagagagacagagcagatctatggagggtctcataggccacaataaagggtttgtattttaacaatgagaagccagcagaaagtcttaaacagaaggatagcatgatgtattttgaattcacaagtcaccctgttttcctgctatgaaggaaatagggggattgggacaaagatggaaatgtgaagtcagtaagggaggctactgcgctcttgcagccaactgaaggcaagaagcatccaggcaggagacagcagtagcctggactagggtgacagcagtgggtttggagaaaaggggtaagactgccaggaattgcttatggattgggctgaggttgggatgagaaaggaagaagggaaaatgacccctaacttgggtggttttgtttactgaggtgggagagactagaggaggagaagtttggggagaaatcacttggccatgttacatccgagatgcctatttgacatccaagtagctgatgtcaagttgacagttacataactgggtttcaagctcagtggtgaatttgggctggagacaaaaattcggtagctttcagcatagagatgatgttggaagtctccatgggcctgtgcaacgtcacctggagggagaatgttttagaagagaggacctatgcctgggccctggggcactccaatgtctagaggaggagtgaaggagattgagaagaatcaaacaaaagagtgggtgtcatggaagcccaagagaagaggcctctcctggaaggataagctgaagtctaaagatccactgagccccaaacccctgttgagtccacagaccctggacccacacagcttcaggactgacctggaattgagctaacctcagttgttttaggtcaaggcacagggtgtgtgccccctccactccattctctcctgttgttcccaaatctgaactgcttcttgtctggtggctgcccgtagtgtgtggtgcacttattcatgatgtaaacagttgccagacagcctgtctgtgctgggacttcaggcataaccatgaacaagagcaatctacacagtttctgcccttgcagagcttacagcatcatagggtcaccaacgagaaatgagacaattccaagaaatggaaatagttgaggtacagctgcttctagtacagactgtgtgatatgggtaagtcaagttgctgttctaagcctggattttcctgcctgaaaaatagaactaagtctgagagactttctaagataccctgaagatgtgaattaatgactgtgtgaatcaaaactcctatacatcccatcccattttaattgcatccctggaaaggacagcgagtggaaaggccaggctagtccttctgtgtattgagtcacgtttggtgcgttagcccacgccgagcctctaaacttccttccgctcacttcgagtctctcctcaggagctccccctgctccattttccctcatattttggctcttctttcccatctccaccatcccatttctgtgagctttgggccttctccttggttccacttgaccgtcccaaagcatataaaaggacttgttttcataaggaagaaccttttggtgatgaaccatgacattttgccttcctgagaggaatctttgatgtttaaattatctggggatgtttaacaaaggaatgtgggaaatgcaaaactttttacaaaggggaaagatgcccacacagggtgaagtgtacaaagcttcaacctggtaataaactctcaatttcttccttgaacacagctgcacctctcctcagacacctccaaagcttttggggagggagctggttgctgtgccttctcagaggagtgcgaaatgtgtctctgagaagaacacagccatttgttctgttaggatgcttctttcagactgtaattagagtgctgtggggggtgtagatggaggagaaagaagaatatgaaatgctcttacttccctgtggctcattcttcctgcaccacggggctttgaacccactgaaatattgtgactgaaacatacactgttatatgcagagacagagagaaagcagcatgtacacctctgagttcatgccttgatagtatctgtgtgctacaatgaggtggcgcagactggcggagaattaaacagagtaggtctgaattctgctgtgtaactctttgtctttcaacactcttgaaagcctttatttttccaaactgcgaaacagagatgaaagtgtggtcccctagcccttttcttaaaaggttttaaggaccaccatgtgagaactcataacttttcaatattcatagtacatgctattctgtgatcatcccacttatgggagggattcatgaagcagttataatgaaatagtgtagcatccaagaatatttgtgggttttttggttttgttttaaactttatttgcagcaatatcaacaacaatttattgatgatgttttactgaattatcagttaacatctttctagcatgtgccagcagaggggaaggagggtggcagagaaagagcatctaggatggttctgtttcattcacagcagacaatccttgaagcagctggcacatattgtgtggatgacagagaatttggtgctattgagcttaatgatctttaatataaacatgtcaggatatccagctgacttatatacacagctgaattcctgatcctccctcttcccaaacctgctccattatcttttccatcctggtttgtttaactccattcttctggttgctgtagcttaaaactttggggtcatcttggatgcatgtctctcttacactcctcgtccaccagccagcaagtcctcctagctgtgtcttcacagtctatccagagccccactgtttctcatgagctatactttaccactctcgccaaggccaccatcatctggatacaacctggaagatctccctgcttccacccttaatccccttcagtctcttttcaacaggacaaccagagacattctttgcaaacttaagttgtgggactcctctgctgcaactgaccaatcgtttcccaatgacaccaagtaaaactcaaatctttatagggtatctatggccctacatgatggccctccacttccccactgcctgctaccactctgaccttttttccatgtattcagtccactctagtcacattggctcttttctgttcttcaaaagctcctgcaagatgcttctgccccacagctttgccctggtcatcacctctgcctggaatcctcctccccggatgtctgcatggctcacttcctcacatctctcatgtcattcctcaagccacctcagtgaggccctccctggccactcaaccaaatattccagctccccgacacccaatacttactatacttctctgctttatttttccctgaggaattatcagtttataacattctgtttattatgcttatttatcttgtttattgtttttctcctgcagtataatgtaagctctgttgaggacaaagatttgcttctttttttgagaagggggtcttattctctggcccaggctggtcttgaactcttgacctcaagccatcctccttcctctgcctctcaagtatctgagattacaggtgcataccagcatgcccaattatacttgctgctatatcctcatattctaaaacagtacctaccatgtagtaggcactcaataaattgtattttggaggtggaatgaatatataaaataaaggccttgataataggttatctgtattatgatacattctcagaaaagtcagtaatataacagctacttggagcacctactataccttgcacattctatcatttaatcctcacaacaaccttttgagataggtatgatcattattcctaattttatgaatgaggaaactaagatttagtttaagaacttgccccagatcacaccacgatggagctaggattcaaacccaggtctgtacaacttcagagcttttaatcattatactttaacattctggattccaccaacttcaaggttaaaaaccgaaacaggaaacatattccagttccttcattatctcccttacattaattgtcatgcttttcttcccctgtgtctactcaaacaaataaatgagatctcaatattgagaagagaaagaaaaaagaccagtcattccctgagctcctaaaagaataatcttctttgagttctcataactgaaatgtcatgaagctgtggaatagcactggctttggaacgtgatgctctaggtctgccgccaccgccctaatccttggaaatggcaagtcatctgacctctctctatgccttagtttccctgcttatggaaagccggtcttggacaggtgatctgtcaggttcccctcgcctgatatcctggtctgtgagactcctggtctgtcttccattgccgtggacataaggtggtggagtaggagtgggatatagcacttcatgtaatgccatttatttgccttaaccactttagggaaggatttctgctcataggaggagccttctgaaagctccagattctaaggaagaatgaccccatatgatgtcgtcgagcatttgcatcacccatcctgcttattagagtcaataatggataggatttagagggctagcttctgttttggcctttattgacaacctaagtctccttaaatcctttctggaacaagtcaagggataaagcataaacaactttaatactgctgaactctatgaccttcaggaaggtgtttaccttctctggggctgtgtttgcttctctgaaaaatgggagaaatggttccccaggctcgtaagaacactgaaaatatagaaacattgaagaggctcaccctaaccccaacccattttccaatggcactgaaatgaaaccactgccaacacagaattgccaatcttgcttccaatttctctgttagtttcagaacatttagggttgaagaggtttttcttgatgtctaacccaaattcctccttcctaaagcaaagactttacaggaaccttggcaaggtttccctatgggtagcaaagctctctgaaacatggactctgaagattaataggaatatgaccatgtggccatttgtgtgcttggcagagtgtgtgtacgtatgctgcttgtgccaggatgagtgtgtgtttccatgccaatgtgtgtgatgaagcatgcaagtgtgtacagtagtgtggataaacagatctttgagtcacacaggccagcccatcctggcactttgtcttccttttggttgtcatgacagcagcgaggggctgtgcatcagtaaacaaagctccctgcatggagccgggaggagaggtctggagcgagaggctaaaacatgagtcaagcagtcctccaaccgaggctttcttaccccagccgacctaccagaacatcttcatcgctagacaagcatcgagataccagtccaggtgccctgtgactgactctggggtcacataacatgggcagacatttcaggctggagctaggctttcatcaacctcacttctaatccccaagagttagcaacagcataatcaagtctagaaatgtgaatgaccgaagaccctcctagtatcagcctatgggctaaaaccagttacttcattaaggcagaaattagccactttgtgatttgtctgtagcagtggctccttataggttcatacattcataaaatgctaattttaataataacctaaaatgatttcaaagaagtctctgtcttctctcccctcatccctccaggcacacatgataaatgttttgggcattctaccttgtatgagattatgtaattcttccacttcatcttaatgattaattatatagaattagctgtgtatgaatagttgagttttacaatttatatttctcatgtaaactgctgcagaaaaaaagcagtcacaaatacaaatgtagtaaccaggataaaagaaaactgtgctcaaccatgcagggcaaagagatccaccttgttcttagtttccatgactgaaatttagaaacccaaaccttgcatacatatgtagcatctagagtagaggctcatccatgcttaactccaattcaccttacttccctgtatgcaagagccgtatgtgaggggacctacaggttatcctccctcagaggagccaggtttggggctggaggagcaacctaaaattaaggatgacagaattgggtaaggagaagtatcgggaatgaaacacgacttggatttgtgtcactgtacaatctcttatgggaatctagtcaggactctcagagtcaaccagatctatccctgcctctggttatgagcctagggtttatgtgggtcctaatgtcaactcttactgatgaagaaattgagacagcaaggtgactgtccagtttgtaagcagcagaggatacctagatccccagctctgaaaatagaatggtggtgtttctgctgcatcacatggggatttgtttttgttccccttgtttggaattctgaaatctagatgcatcccttcttgatttctgttgcatctctcggtgtagaaaccctggatagaacaaatgaaaaggagccaattacctatcctcttaccttaggccacaggctgttgccaaggggccttagggaatatgaacactcttcttctataggccagattcccccttttacattttctatgccttgctccaagggaactggataaattaagatattcatagtgccctgctatgagctgcctttcagtgggggaattcagcagtcatctggtaaactaaataaccgtaatatgcatcatcatccgaatcaccccaggatcctctgtgaagaggacagggtactcagatcctcagaggagagagggaccagttaaaggagtatgctttgtttcgcaggtctggccacatatatacccatgagcctgatgggcatgttaaatctaaggtttatgaagctgaatcttatttgctcctgttctctccagaatgcaatatgtgtatgaataaatggacacaaaatcaagcagtatatcactagcttgactaacgctatgaattttattctaggtctttaataacccaacacagagcaatggatttttatgctactgtctcaatgaaaaggatagtcccttaaagaaaaacaaaacccatctgttttaatatccttattttcctcaaccttgggctgaaatgaaatccctcttgtagattttaaatgttgacttctagatagcagggaagacagctaaggcattgtggaaacagcacataacctggaagaagacattagtttgaattttgtctctgcctcttgctaattggattatcttgggcaagtaatctttttgaatctcgcagggcttttgaaactataaatgaaataatttacatgaaaatgatttgtaaatttaacaagtttaaatgtgttacatgaacattagctgttcttgatattttatttctataatctatggaatctatcataccagacactgggttaagcttcgctgacccttgttggaatgtgatacttgacctcatgaaggctttacttgacctcatgaagcctgcagactagtcagggagacaggccatgggtactaacaattacagcagcgagggcagaggggctgtaagagttaggaaagacacaggtgctggacttgctacccaggttcccaatgaaagaacaaaacagaaaaggctgcttgataaagcatcataaagaaggtcccccacatcctccattaaggtgctggagctgcttaggaggtactcccagtggtgcacattcgttgctttacttcttttagccaagaggcttggccaaattggttgggctctgggactgtgagttccagctaggatgccaggtgggagggtgggaggaaagggagcctacaatggcgaagaagagcagggaacccagcgagtgagacctggatccaggaaacttccaaacacaaggaggcatgtggaaacagcgcttaacctggaaccggaagaggttagataaagggaggttagacgggggtttgttggcctatcctaccagaaatcaagctacatcgtcattctgggggccttataaagatgacataccccattcttcatagtctaatttacactgattatagtggagtcaaatgaagagaaactggtggcagtgtgcaggagttgctcctagttcacctgctccctttgagtcagtgcagagatggagtactcctccttttaagcctctgggagtcagggaagaactatgacttctcctagttagcctggatatttgtcattaaaaaaaatctactgaacatatactatgtggtaggcctattctagtctaggaagatagaaagttgagtaaggcacagaatgtttttgcaaaaagctcacatagaaggagagacatacagctgaccatagtaaaggtctgactgcaagatgagctctaaagggatggggaagaggtagactggaggccagaaggttggggtgcagtgatggtgggacccaaagagaagaggcaacatttcagcctggccttgaagaaggattttgactcaggcagataagcattgtgcactagccttgaacgcccatcctgccttttcagtaagtgtgggaaatgtgctgtagttgaagtgtggctgtggtgggctgtaggcaggcagggggtggatagggatggcaggaggagataaggcttgaagagaaaggtttggctacaactgtgtaagactttgaacgtcacgcttgaaggcttcatcctcttcattgagcagagggtgatggaagccatagaagaggggctaatagagtagaaagagatgaaatttagaagatctgagagttgtggttcctctgaggggctatgtgtccttggacacttgccctctcaaagggccacttaagtcactttagattcagttttctgagctggaaaatggatatgttggtcataatgcttatcctagatgctcaaggatgatcatgttcctccggtcgtagcctgcttcaattctcctctttcaaggtcttgctcaaaatatcaccttcttattaaacctccctggattcccccagggttgagaaatcaagacacagacctatgaaaaggtaaagtaacatataaaaatgccatttggctaggcaaatatgtggtgcatgaaggacttgggctcttacaagagaaaggcctgggttctaatcttggctctgtttcttacttaaactccatcaagttgcataacttttaagttaaggatgaaaatacctattctaccttcttctcagaatggttgtaaagattaaatgagcaaaatatatgaaggtgcttggtaaattaagatgtgctctacacatgttacttgccatggttagtactggaggtttggaagtggtaagatccagtgaatgaccttttaaaaagataacgttgatagtgtgagatgggtgaaaggaggagaaagagacaggaggttgagagaccagccgggtgctattgcagtggtccaggcagggaaggatgagatcatggatcaagatagtgaggatggagaggcagggtgaattcaagtgcttttatgaaggtagaaccaacaggacaatggtactaactggacaggagggattgaaagaagcaaaaatccaaaggtaagaattttggtggatggtgatgtcatgaaccaagccagccccttgttactttcaaatttctgaaattcagaaagtagaaaggaggcatcccagggcttgaattcagttatcctggccctcactggccctggtcactcttcattttgactctttccttcccttcccccatagcacctttagtagaacccaatgaacctgaagccaagcacaggagaatttgtccttccggtgtgcctttccctacaccttctgcctgattgtaagcaggtggctgtacccaaggacaccagctctattttggcaggagggccaggtgtgacacgaacaggtgtctgttggcattatggtagactggcgtcttccctttccctgcactgtagctggggcccatcccccagcccctcattcatttcttctttcctagacatgacagagaaactggcaggacttacagtgggtgctggactccctcagattcagtctgcagctctatttttttttaaacgtcttgctctgttgcccaggctggagtgcagtggcatgatcacagctcactgtaacctcgaattcctgggctcaaacagtccttccacctcagcttcccaaagtgctgggattacaggcatgagccactgtgcctggcctgcagctctttatggggatcacatttaataagtagaacagcttcccaggtagtaggagaacacctgagccatggctgggaggcactgcactggtaagggcatcctagcctggaagggtgtttggtgatgagagaggcattgctagaggtggcttctggaggaacctgttagcaaactgtgatttatttatccccattctttcacccaataaatttgatcctcctcttctctatcagggagcccttagtcctcttctcttctctttctcccatggagctgtagccttctcattcctgttgtcacacggagtggcattggccccctgagcccatcttgggctctatcttcttcctgaccctgaccttcacctgagtgttccctctgcctcatgatctcccctccaccccacccccaccaccttcccactggctttatgggagtcaggtgtccttctcacgtcccttcctttcttatttaactgacatcagtcaccttcgaatagcattttagcctttgaagtcatcaggctcattgatcttcagtggcagcttttattgagcactagagtacaggacagcagaggcaacacagcattgtggttagggttcaaatcccagcaaggcatttcacctcaagaaaccttggcttccccatctgttaaatgggaattttaatagtattaatacttcataggatggtcgtgaggatgaaatgagttaatgggtgtaaaaaccttgatacagggccaacacatcataattggtcaatatacgttaatcactattgttatcaaaaggagaaagagtagctgtgcccttcagagggttaagggtttttgttgtagctgaagaggtggaacatggcattttgaaacctagtttctcacatggctaagaacatacctttcaaaacagagcaagcaatcagttggtcctgactggaatgcagctagtctgggaaggcttcctttgtgaggctgaatgaggtgtgtttctgtgtaacattgtaaggaggtcatatttgcagcctgggtcaggggaaagggtacatgggcttaatagaggtacttgctcagatgctctctctctgttgcttgattcactctttcccttagtcatggccctgtccaaacccagtgaatcttatccttcttgtccacagggaatttgccaaagagagagagagagtggagaaccgaagggctttcatgaagctgcggcgccagcagcagattgagcgtgagctgaatggctaccgtgcctggatagacaaagcaggtaggcctggggggctgcaggaggctggtgagtgggctgcagagacatcagggccggcccctcactcccaatgctcccattcaaggggcagcctagacaagacaagagagacactctggatgcttggttggctcttaaggttccctgctcatccgactttcttcctctggggtctaactgtcctgtctatcaaactgtcccaacaccttaaggcaggcatcttagcaaggtgaactgagtaaaagtaacataacccaatcctggagctgagactgggctgatggcgttttgtaataccgttcctggtgctcacagcagtccattcattcagcaaatatttattgagtgcctactttgtgccagaccctgttctaagcacttgggatatggcagtgagccaaacagtcaaccagctcaccaaagctcttctcttgtaaagctctctagttggctaaggcagcgataaacaaaataataaatgagtaacttataagacaatgataaggtggtaaatatgatgggaaaactgatcaagttaggggtatgggatatagaatgtgccacagttttaaataggaggtcagggtgggcccattggtgtgtagacttgaagaaatgaaggagtgagccagaagaagttctgggagaggagtatttcagcgccaagtacctaacatgggagtgagctggggtgcccaaggagcagaagggggaaggaatagggaggaggaacaggagacagagtgacagctgtcatgggggaagtgggcagcaatcgtgtttgaccttatggggccttgtaagggctatgggcttcactctgagtgacacaagaaccatgggagggttttgagcagaggactgacgtgctggccgcattgagaatagaccatagaaggataaggctggaagcagagggactagtagtgccgccatctagggaggagataatggtgagaacaggtgttttcctaagccttgagctgtcatcagttcttaccctgtgactcaacattaggaatagttctcagctgcctgtgagaataggtccaaacctatcatgatttcattaacccacagagccaccagattcaagtttggctgtggctcagatgcttatgaagggcatcaatcacccccatatttgtcaataaaagggacgggtttgctttctttattattttaaaggttggtttgcattagtattatatatcttcattttcttccagaggaacaagtgatttcttaaataaaaactacacgtatgacagtatcttttctctattcctaatagaaaacatagcacaaaagtgaggtcacagaggaaaaatttggagtttgatttagtgcttagttgcttgagccttattcttctgtaggagctttggaatgacactataacacttactgtgactgccaacacacaaaaaccctctctaagctctgcagtcaacttttggtgacctccaagggttgagagggtacctgtatgattgcgatctgcactcccttgtagcctctggaaacatgagcaatgtgtgttgactatacttgcatttcgccctttctcctccaaggctgttgtgtagggatgaagtggacacaaatatcccctaccgcttcccagaatggtaactcaggcttaccatgggaggtcaagcagatttgcctctaggccaggaaggcagcttgatggtcccagctgtccttggctttctcggcggaggagccatctgacagaccactaagagagctggcagcagacccaggaaggagcccgcccagccttggccaccccacacaggtcaggtggcagggtatgctgctcgctggggctctgcttttcaaatacttgcagaattccaaggcttccctttcttccagttggcaaagccagctctctcctccttctaagaaaaaagacgcactgcgacgtcaaagtgtgcttcctggcccttccctttacaaatggagcgccagtgaatcagagacagatgggttacatttccctggaaagacactcaagttctaaagcgaacttggcaaaaggcatggggtgaggaggaagggggatggcttcagcaaatccagagcccttgagtgcttcccagagatctcggcagcaccacacaccttccatctgtcctggggggtccccagatctgctcaccccaaagcccagacactgtgcacagcaaaagtgacttgactgtctggctaagataattaaagttgctatgaggtattttaacaagttcctaatttttaaatgatgccctccaaacacgtgctataaaatgacttaaaaaccctttatgtctgcaggaaggagtgccccaccaataacacttaacctgttaatttagcgttttgccagaggctatacttaaaaaagaaagcaaacatttatgactttgtaataatggccatccggtgagtaccatcccagccttaaaatgttcccctccctaggaaatacattatgtactctcagttttatctgtagctggaattacggtaatgactttaacctctcctactgtccttttacttgttaaaagtgtttaaattaaaccattgtttagtagggtctgaagctagctttcccccagcagctgggatcttagggaatgtttaacgaggcctctggctccctggcctatgggttgagctcaaactcatcccgttactcctcatagggcatgcaggatcccaccagacttgggagagaagggctattttgttgatgcacttggagggatgctagtgaggtttggtctaaaagtcttagtagaaaatattccccttcagatgatgacacctcagtagagtatgggactgctcctggggacaccaagtgggaagagtacaggggactgtctggtgtcattttagaactccaacaagcaaatatattatttcatcatcaaccagtccttcagttctctaacaccaactaggtgttcaacaatcagttaaattctaacacgaaatactacctcaaattagcatagaccccacaggttaaaggctcggttccacaggactgcccccactttagatggcagccaaaagtgggatctccaggcaaccaacatatctgcctggctgactacaaatctggggttcccacaaccatcaccccactccccactggttcagtaatttgttagaatgactcacagaactttggcaaaaccatactgtattataaaggatacaactcaggaacagcccaatggaagaggtatatagggcagggtatggtggtggggagcacagagcttcatgtcctctctgggaacaccaccctcccagctcactgatgtgtttaccaacccagatgcctcctgaaccccaacatgctgaaccccaacatttagcatgcccatcattacataggcatgctcgattaaaccatcggccattggcaattaaactaatctctagtgcccctcctccctagaagtgggagtagggggaggctgaaagttctagcctccagtcctgtggctgtttgttctggctacaagctacctcctctaacctatccagggcccctctctcctccatgagtcatttcattagcatatgaaagactgccaggaaccagagacaaaaaccaaatactttttaaattttatcttagggacaaattcatgattggcccaagcctctttggctcaggctctggtcaaccaacaaaggatggaagccatggggacaggaggaaacccacaagcccccctcctgtctccaaggacctttgggcatcttcctctgactcctcctcagagacatagaataaagcccaaaacatgggctcagctcctgaatgagggtgtagatgttataacccatggccactggcaagagaagctaaggaagctgttgctgctagaagttcaaggagttaggaaagacaggaagctgggtggaattaaaaacagaaatggaaatttttcattcctatcaaggattttagcttcttcctctcttctcacaggtatcctcctgaacaggagtatcagacacagagccgattgttaccccaaacaccccctccccgaggcttcctttctgttctcaggagctctctgtgcaccctctgtgacacttgctttctttctgatgctggtgcctgtgacaggctctgaactctgctctctctctgttgccctgagctgaagttgtccctgagggattttaatcttgcagaataatttggcatttacagataatttaccaaaccatttgtttccatatagaggaagtcatgctcgctgaagaaaataaaaatgctggaacatccgccttagaaggtaaggaaatgttctgatgccttattccagttgcatttgcccctcttaggcgatggcaatctctgttattcaaaaggagagaaagaaatgaaagatggtgttctgggattggaaatgagagtctttctgtcataaaatccctcatgctttaaaatgaagggaattgagtcacagatttaaatgccttttaaagtgatgaaaatgaaacccaagagttgctttgttccagggcatgtgattgatactgagcaaggaaaaggccatcctacaaccaatgctatctaaagggaccttctcttaaaatgtgtggggatcaccttgagaccactttcattaccaggaagtggcattgtagatgaagagccaggacagatggatacggagtgcctgtttacctcctgcatttagataggctctagcatggcttccagagctcttgtgttgcaggaaggtgctggtgagcacagcatttgcggtccggtagacatccgtgatttctgttaccctggctcaggtattaaaggcagatagatgcctgtgttacaggggcctcacacaaggcatcttgcctgcattcctcaaaattttgtccagaatggtctgggtgtacttgtggcctctcactggtcttccctttccctgatgcagtgcttcgaagggcaaccatcaagaggagccggacagaggccatgactcgagactccagtgatgagcactgtgttgatatctcctctgtgggtgagtggatccagttagatcttttactgctctgaatctcccacgaaaaggaagatcctgtcttttgagaagcaccacaaggagggaaagaatccaaagggtccagaatttaggaatgtaattaaggaaaagggtggaaatcgaatctagattacaatgatttatttaaaaaaaaaaaaaaaaggacctggggatgctatttattcacacgaaacatgggatttagggctaagaatccaacccaagtttttcaggtgtggcagatgtattccatttgcagaagtatccaccctctcctgggagtgatgatgagaacccactatgggacattgttcaaaggatcctgaggacctgttgcttccagggacacggatgtgagatcttgaagccatttgcttaacaacagtagcccccacctacttccatcatgtgaaatttaaactaattctgattggcaattatttaacattatgtgttccatctcaggtgctcctagagattctggctgatggcaggtttttcctccccagaaaaagggaaaggtcttgttccatcctcaaaagcagaagagacttacaaagctcattgctgttttgtgccaccagtggtagaaatatcaccagtgtagcagaagaattccagtgcttgaagctattttaaaaggaaagggcagaaagaagcccaatctgttaaaaacataaacacgatcctattaagattcaagacactggtgtcctgtctggggaatctttccatttcttaggactgagagtgcccagagaggaaaaacagggtcactgcctatagaaactactgagcccgtaagatggggattccccacacctgcaatgtggcagtcaccttgccctgggactagagcagcccatcttgcccttcgaatgctccctggcccggaccacaggatattttgcagtctcattcttccttacttctccctcttaggcacacctctggcccgagccagtatcaaaagtgcaaaggtagacggggtctcttatttccggcacaaggaaaggcttctgcgcatctccattcgccacatggttaaatcccaggtgttttactggattgtgctgagccttgtggcactcaacactgcctgtgtggccattgtccatcacaaccagccccagtggctcacccacctcctctgtaagtaaagcctctctctaaagcctcctctgctggtccccatgtggggcagcttgatgtgtgtgtgaacgcaagacagcaaagcaccctgctaggaaaggttctacctcttcacgctgtgagggaggccacatcgtcctcaagggggctggagtatctcatgactgtttccagctttcattctttaggtaaacagatcattgttgatgaatcaacaagatagcataacgttatacctttgggtaccataaagccttcacttcctttcttaaggaggctcaatgatcaggagttttgatcattgaaatcctgggcaggaagttctcagggcaatggagacctcaaatagaccagaagaagagcttataggtcagctccagattagactgccactgggtgtgagtgagggtcaggggcctgtccctgccaggcatgtagggaggaatccagctctttgatcaaagccatagtaagtcctctctttccccctgagggccctctaccatataaagaccagtgacaggcctacctattgaaagagagcaatgctgatctcttgagtgcacctgggactcggcctgggtcagagggtactcggacatcattaggctctgtccagccctggcctgatgtggccaccgaatgtcctgacgtgtgttgttgtgagatcctctgtaggtgggtgtgttagctgagaagtgcatgagcccaccccacatgtggaaccaatgctctacttttaatacttccagactatgcagaatttctgtttctgggactcttcctcttggagatgtccctgaagatgtatggcatggggcctcgcctttattttcactcttcattcaactgctttgattttggggtaagtcctcggaagcctgcctctgctcctgcttcgtgttgatatgccctggttttagataagcagcttgctccttactcagcatgaggcactgaaatcagaatatgtaaaagcggaatagataagattagctaaagggaattcagaagcgagtgaatccttcccatgcagggtttgtttgtttttctgagctctttgattttcaatatttttattaaaatgtaacacatacattatagagggtacacttaagtgtatagctccgtgagagtttacaaagctacccatagccagagttttgaaccacttattatcttgggggaagcctgaaaaggacaaaggacttgattttagaggtggttccataggaaagagaagcttatatatttgtttttctacttcagtttaaaattgggataattatctagatagaccctcattcaaacacacacacacacacacacacacacacacacacacacacacacacacacacacacacccttatattagcaagtcctcacagagaatatctcagtcagctgtttactttctacatagcatggatatctaaatgtatacattgtgctaacacttcaaggtgctttcacgtatcttttatttttgtcccctgccgcttacaggagtcctatgaactacattacatttcaggagttagccttcccatttacacaagaataaatagaagctaccgtgcccaagttcatatacccagttagcagcagaactgggtcgcagaactttgggctcctgaaccacttctctttctgtcaatcccactactttttctgccaaagcttcagttaggtgctaaagattttgaacacttgctaatctacattttaacttggaacatatggttctgagtacgggcaattttcaggcataacagctagtgagagatcactttaacctcagtttctttgtgtccgtacctttcggcattgctgtcaggattaatagttgttgtttctcctagcacaatatctagaacatagtggacattcaataaatatataattaaaataaaagaaatagaaatgttcatctgaaattgctgcatcttgcagcaatcagatcctacatcaccatgaactgtcacattgcgggatgcaagacctccatgactgaaagatatttattatatcaaggaccaaaacattcttgttagcactaaattttaggatgatgagagaatgtagaccttctctgagatttctgtattgagaagcaacttgtactaatcagtttccttggtttgagtaccactcctttgtcagagcagcagaagcagcaactggctgttgtagttttcaccaaggacaggagtcagtaagccaatctacagtgtgaaggattaaagttaggaaggggattggagagcaatgggagagaggtggcagcttcccacataggtagttctactgaaggtagggctggtgggagaggagagtttttatttccccatcccccactgagagctgttgatggtgtgctgggcgctagaatgccccctcttctcctcttcctcctcctctcactgtggctggcattgcctctctaggtcacagtgggcagtatctttgaagtggtctgggcaatcttcagacctggtacgtcttttggaatcagtgtcttgcgagccctccggcttctaagaatatttaaaataaccaagtaagtgatcagaatttggacttttcccaatgtctttgagagtagaaccttttttctgccttatattttcttccatcttctctttcccccttagggggaaagtatcccttccctgccccaccccttttctattctttagctcttcctttttctccaaagattaaaccaaaaatatctatggtgccacattcccaaggggagcaataggtttctgccctctttacttcctacaaatatacaaatgcagcttatttcatagactaccaggcatatgctgagctgggcttggtgggtgacttggtatgcagtgttcacagctgtcacattgtctgggttttgtaggtattgggcttccctacggaatttggtggtctccttgatgagctcaatgaagtctatcatcagtttgcttttcctcctcttcctcttcatcgttgtctttgctctcctaggaatgcagttatttggaggcaggtaagtgcccagaagctttccatccaaaggaggctcaaaacccagtcgtagcctgtgttgggctagggtcattaactcaatcaccatgttactatcctgtctgcctttgcccatggcctgaattaaccactgagtgagttcatatgtggagtaaacgtctctgcttttattcctttcatgctgtacagggttctcattccggggacccatctctttggtgctgtccctgaaatgtgcagcgtgggcacattcttcaaagtgcatagtttatcagtagtagtcactgttacagtctttgtaagttatgtggaatggggaaaaagtagggaagaggggggttgtagaagaaaggagaaaagaagtgatgaaagctgtgatcttggggaatggaaaacttggtatgtgagattttcatttcattattttctctaattttgtttttcaggtttaactttaatgatgggactccttcggcaaattttgataccttccctgcagccatcatgactgtgttccaggtatgaggccagctgacggttcacaagtgctgcatggggtcccttggactgcacactgcaagacaaggatgagtttcaggataattctgcttttcctttccaggctcctcccaggggattgaggcactctttctagttgagcggtcattactacaataatccctagaacttctgtggctttgttcttaccaatagtaagagagctctgttgggaccatctcactgtccttctctcacacctgtgagtttgcaggagacactgagtctgaggcattcagccaagaatcacatctatggttttctgaaatctaggggcatcttctaacccatttaatgaggtatccattaaatggtgtttatttaacaaggtctcttttccatccctactccccccaaaactcaaccgtttaaatcatggggaaaactcaaaatcaatagtgtcttaggcctaaagaaaaatactgtttggccagaatctgaggttggaccacaacccgtttcctgaactgcagcccacaaggctctttccaatcatgctgctgttccagaccctgtatctgggcagctctgaggacagttaggtaatgaccagaccacctgatctgtgtcatttccacaaggaccttgcaaaactggaggtgggagacactctgtagttggaggaacagaatctttccctttgatgctctccttccattttcaatgcctaaaattcttttccatacgaaaaaaaagtttaggattatttatggaaatgactttttttttttttaactccctggcaagattgtcaagcaagggggtagatgcaaaagacccaggcccagaatttgcccttggcattggccccattttctcctccagcccaggtttctgatgcgcctgtcatttgctttttgtagatcctgacgggtgaggactggaatgaggtgatgtacaatgggatccgctcccagggtggggtcagctcaggcatgtggtctgccatctacttcattgtgctcaccttgtttggcaactgtatcctttttaagatgcacctcctcaagctgcctgccttcctggaccagcatttgaggaggcattggtggtggtggtgctagagcttgggttggtgggacaggggcgtggacattgtttggtgtactaaagtaaataaggatcctgatctgaaggactttatgtactagttgggtaaagaatacaaacgtaaacaagatagagtattatccaaatctgtagtgtatgcaaagaataacataggaggctgttacattgaatggttggaggtactatgagctggggaacattagacaaagcagagatcactgtaggctgaaagaggcacattataccactaatgaattaattacatgctaatgtagaacagagcctgccacatagtaagatcccaaaaaattagtgttaggattaatgctattactgctaattatagcaaatatgtattgtatttgggctatacgtgagaccttaaactaagtgcttcataggcactatttcatctaatccttacaagacagagaaaaaaatatctcgagtaaaataactactaaattgtaaagggaaactaaagtccagttccatctaactccagtgccctatccaatcacaagatctagaacaggaaatttaggttttaatcccagcaactctgtgtatcagctgtgtggccttgggaaagttacttaatgactccaagcttctattttttacaactgaaaggagaataataatatttatctcctttgttcgtggtgaatactaaatgagataatttatttgcatgtgatttataattacaaacttctatacaactgttagatgcttttggggagttgggttggccgtgaattgggattagtagaacagaaaggcagaaccatgggacgcaggtgtatttttgcattttccatagtttcatagagaagacatgctgttttacgttttctgccctgaaaacatctagaggttgggacagactagaagctcaatatgagaaactcatgaaaagaacactaggcagtaagtcacagacatggaagctccatgtgtcccaatggcaccatcattttcctgatattctgggggtagtcagagctgggctttgatgctagaacagttctatgttccacaacacataggctttgaagagagttggaaattgagacttcaggcactagagtatggcataggaatagatttcatagtgaatcatgtctgctgtgtcacattttgttaaatgaaatgtggaacccttcaggaccctcacaagaagaatgggagaagttagcatctcattattgggagatgctcagtaacaggggctctggaatctcattctttttgtcgttaaggacagaatggtgtgacgcccattggtctaggtaggattcaattccagcctcccagaatggggagatgagctcccatactgagctccctacacatctcgttcagtgattctcttagttgttattgctatgggtagaggccacagctgtctaaagaccttttgaatgtggctgaacaaactcaaagtgctttttctgttcccttactcatcaacaattaatgcagaagacttctgtaaccaaatgcgtgggtttttttactcaccaacaagcaagcaatccggcagtggatactaattggtgtcctctaattcaattctgacgctatctacctggagatagcatcagatcccacaggtcgatggctcaatccccaagactgcccctgccttacgatgacgattgcatgcctcaggttactttacctgtgttttgaaggctataattcggggttcccacaacccccttcctgggtttggttaatttgctagaatggctcacagaactcaggaaaacacatttactggtttattataaaggatattacaaaggatgcagttgaagaggggcagagggaaaggcatggggatgggcacagaacattcatatcctctccgggagtgccagtctccaggaacctccacatgttcagctatccagaagctctccgaaccctgtccttttggattgttatggagtcttcattacataggcatgattgattaagccattggtcattggtgatcaacttaaccttcagcccctcacccctccccaggggttgtgggggtagggctgaaagttccaactctctaatcatgccttggtttggtgaccagcccccatccagaagctacctaggggctaccagataacactttggagtttctaaggatttaaagagttgtatgccaggaaacacagttaaagaccaaataataatttttcacagtatcgtaattttcctcaccccatctggcccccagatggtttgattcaagtatttctttatcctgggtaaagagatgatatgcagaaggagggaagaaatatcctctttctcctttcaacagagttgtacaacatctccctctctgttctcacagcccctgcttaagtgactcttcagggtagcttctgttcctgttaatgtcccaggcaggaaagattatcaggtggcctctcagccttgctgaagacttttgcttttcttatttgcccatccttaattcatcaccccagacacgctactgaatgtgttcttggctatcgctgtggataatctcgccaacgcccaggaactgaccaaggtaagcattgttttctggggatctgatgtttctctagtgccattgggtaccctttggcctttggaactctctcccaaagtctacattgtctgactcaggcctgccaggaaggccctttctggaaacttctggacagttggagagccacacacccatgacggaaggctggttcacttttattgagtttggtgagcctcaacctagcccagggggcctcaaggaacacagaaaataacatcttaatttctatgagccctcaaaggagtcctttccaggatcatcatggagagtcaagaaaattctaaagccctggttttaagttccacctctgctactgcaacctgcggctgtgtgacctgaatcacatgacttaacccttttgggttttggtgggagagagatcagggccatcacagttcctgggctatggctgttgggatattccagtaggcaaaggtcattttggggaaatttcaatgaagccagatactaaatttctcacagaactgttcccttcttttctctgattaatttccccagtgtggggaggtaatattaacagcagtgggatggtctacagagatgagtaaaaacccttctcttcacagagggtgccaatttggttttgggcagaggtgcatagcatcctgctgacatttctgagcttcttccatgcattctctgatgatctttctacatccttgagggtcttcttatctgcatatatggtaggaaaaatatcagctttagtagctgagaaactgggtctgagtcccacacctgccattggctgtgttggctttgcttggactcctgatctctattagcattggtttcttcatgcatgagacaggaatgccatatctgcattgtgtaccttacaggattactgtgaggatcaagtaaaataacgtctgtgaaaaccatagcatgctctgaagatgtatgtgctcttattagctctagtcattttacctgagctggttttccttgggttcatcacatagaggggacacttgcaggaatgctgctgaagggatgagatcttggcctaagcacccacttagctgtgcaaagaagacactacaatggggcactcagcctcagcactttacttggcggggtccttgcctggaaggcccctgctccatcacttccagacactgtaggacatctgggaagtgtcagctcctgccactgacctccacagccatagccagctccactgagggctaggggttggggtagacttctcctggttctcatgagcaacctgtggatggctccaggatggagacagggattgctggccacgctatagctgtgagactactgactcccaaggggcctggcctctggccatcagaagtctctgagccaacctaacatctcgctgtcttgtttatcctcttcctgtgtcttcctcacttcacttggtattcagaactcctccttaggagagcagccaagggaagctactctccttcctggggatcccaggcaaagccatctctgctttgtgtctaggatgaacaggaggaagaagaggccttcaaccagaaacatgcactgcagaaggccaaggaggtcagcccgatgtctgcacccaacatgccttcgatcgagtgagtcagctgcccccttcactgatccctgagctcctgtgctaacagccaattcatcaactcacagaactattggttataggagtgtacctactacatgctgggaactgttcctgagaatacagcagtgagccagacagagtctgttttcatggaagtgttatttcagtgagtgagatagataataaacatgcacatcatttcagatagtgacaggtgctataagtaaatgaaacagggtcctatggtggagaagtacaggagctgggtgggagcagcttatgtcaagccagaagggattctctgaaggggagctgtttaagccaagacctaagtgtgtagatgacagtcatgtgacattttgaaggaagagtgttccccagcaaggttcagtgtgactggtgtgtaattaatgaggggaaatagagaaagggccagggagggggcaggggccaactcggaggtccttaaagtccaggtggaagagtttagcttttattctagctgaaatcacaagaggacttcaagtggaaggatgaataggatatgatttacacttttaaaaaggtcactctgttctatggagcataatggactgtaggggccagagtggaggcagggaaagagtctgctctcagagtaaagtaggtgagaggtaatgggggtttagactagggtgggggaagtcaaggagatgagtaatcccattcagtcggtagtttggagagagagccaataggatgagctcatggattaaatgtggcaggggtgaggatgaataaaagggaagaaacaaaaatcgatcccaggttttaaggttttgtggactaagcaacgggttggggagtggtggtagttactgtatccctggaaactgttggaaatctaaagttcattttgagatacttctaaggcatccaagtattgaactggctattggttacctgcatctggagctcagaaaagtcagaattaaaacaatgattggggaaggttgttcgcatttagatggcatttaagtcattagtatgggtcagatgacccagagacccagctgctgaggacagaggctgacagcgctcctcctgcttaagaggagaaatcagctaaggagaccaagggagtgcagccgggaggcaagagaaagaacaggaggtatagtgtgctggaaacctgtgaaggaaaactgcaggaaggaggagtgggtgccggtgctacatactgtagaaaaatcacatacaatgaggaacagaaaagggaccactgcatatggcaaaatgaaagctgttagtgaccttacaagagccattttcgtggccaggttggaacagaacccagttgaagtggactagggagagaacaggatgtgataaaggagagtggtgagtccactgcttcagggatctagcctggacctgtggtagagctacaggtagtcggcctgggccctgcgtggcctggtctctgcgtggtgacacagaggggtgttggagaagaggctgggaagtgaccatagaaccacataactcctgttgttgcatcggggcctgcatgaggactgtgtgagtggtgagtggtgctggggcatctgtgggagggtccgagacccccaagggggtagaagtctatcctggcaatgaccctgtcattgttacttgaagctagtaagggaagagcccttggttggctagagttccagtgaagggctcccaggcagcctcttccttgccttgtggggtgtgccagggttgtgtgttgaagcgggggacctccctcctgcacggccatcatgttgcctttgcctttcgtaacaaatgcctggcccctggatccctcttctgtgagtgaaagagaaaaattcccttccaaatcgttaaaggttgatagggaaatgccaaagattgatagggaatattcctctctggaatattctctgggccttgagtaatttctactccaccttccctgaactcatgagtttgggttaaaaacacatacacacaggtatccaaaaatgtggatgggtaggactggctgtcacttaggagtgggtggttctatttactgagatgaggaagcctgggggagaagtgggtttagagagatgtgagttgggacaacgcttggcccagagtagaaactcactatttctggaatgaaagaatgaatgaaatgtgggtaggcacaggcagggccgtgggaattgagcagagtgtgcatcagggcacagtgaggtggaaggacgtgctgcaaacatccaagaccagcagagacccgggctttggtgctgtacatgtgctgtgaggttggcgttgctggtgtgagccacctccgggtgtgtgtgccccgctcagctgtgtacactctgctcaggtatgtaccctgcacagatgtgtgtgccctgcaaagacgtgtgcaccctgctcgtgtgcgtactctgcccaggtgtatgtgccctgcacaggtgtgtctacattgcttaggtgtgtgtgtcctacataggtgtgtgtcctctgcccaggtgtgtgtgccctacacaggtgtgtgtgctctgcacaggtatgtgtacaatgctcaggtgtgtgtgcattttgctcgggtgtgtgtgccctgctcagctatgtgtgccctgcacagatgtgtgaacatcgctcaggtgtatgtaccctgctcacgtgtgtgtacactgctcaggtgtgtgtgcattttgctcgggtgtgtgtgccctgctcagctgtgtgtgccctgcacagatgtgtgaacattgctcaggtgtgtgtgccctgctcaggtgtgtgtacactgctcaggtgtgtgtgcattttgctcgggtgtgtgtgccctgctcagctgtgtgtgccctgcacagatgtgtgaacattgctcaggtgtgtgtgccctgctcaggtgtgtgtacactgctcaggtgtgtgtgcattttgctcgggtgtgtgtgccctgctcagctgtgtgtgccctgcacagatgtgtgaacattgctcaggtgtgtgtgcactgctcaggtgtgtgtgcattttgctcgggtgtgtgtgccctgctcagctgtgtgtgccctgcacagatgtgtgtacactgctcaggtgtatgtgccctgctaaggtgtgtgtgctctgcacaggtgtgtgtgccctgcaccagtgtgcgtacattgcttaggtgtgtgtgctctgctcagttgtatatgccttgctcaggtgttcatgccctgcttgggtgttaaggcgaaactgctgatttccgactacactttaagtgcaaacatggctatccatgaagaaacacagaagaagcactgttaaaaagcaaagtgcctgagtgctagttatatttgtctcactaatataccctgtgacctcagagagaaaaccactccgatctcagaacctctatttcctcatctttgaaatgagaagaatgccacctgcccttcctatcccacaagggctattgtgaggcgtacacaaggtctcattcatatgagttggagacatgtggatgcttctctgtatgattttaggtatgaatgtaagtttgaatctgtgcatatgtgagtagagagaatgctcatgcttgtgtgtgtgagagaatccttccacgtacgtacactcttacacacatgcttctggatagctggtatttgaatatttgagaatttgcaaatagatggtgtgatgtgcttttcctagcagatgtgcatgctgcctgtctaaagcgtacgcttctacttctgtatctacccatgcttcttggctctcccgcccccacctgtgccttgttgcattgcaggtcactgatgctgagggttgtattcagttgaggagctcacaggcttctccacaatgatgtctgcatcagtgggtgctcctgggtggccacacacatgtgcactgtgcatcttccagacacccagagtgggcctcagaccaactgcctctgctccctcagtcccacccttgtgtggggctcttctgcagacatgtgaaagatggcagttgagggggattaatttgcctagcatgttctccgtgggtgggcatcagctttatcaggaaaggatcagcatttgccaacatcccaggtccaagcagggcccactgggctggactgagttcatcaggccagtaactggggcaggctcactgcaaggatagcccagatgtgttgtcctctagctgagcattgaacctgtgctgacagcttatttaccaggcatcctgtctgtttttgcgggaacagttcatacgttgccattctaaccttgtgtttgtaaggacacaacatgcatatggaagagagttttctctgtacaaggctaagaaggtcaatactctgctctgcccaggtgaacatagaacagggtctatggccagggcctctgcgttgctcaaaggcagaggtcactgctcacatcctggagtacatggatggtggcctacggaaagatggtgctgcctctgaccatggaccacttcgtagccttgacatcgtgcatggcagagcacttgctccgctgcatgttttgtgaagctgggtcaggttctgctatgggagtcatgagctggggagccacacccaatgaatgtgctatgctagccctagaaatgactcgggggaggggaagaaaactactcagcaacatctacaggatttccaaaataggaatctgaaggatgtgtaggtggaagtttgcgtgcctgtgaggcatggtgtttgagcatctggagctgtggatcatgtgaaatggcataacctgtgtgcctctgcatgtgtgcttcaaaaactagatccatgtatttgcacatagcaaggaatcgaaagtcactccattggagaatcgaatgtggggagtctacagaaggcaagcaggcacatggagacctgatggccacacagaggactccctgtctccctctggaaatctgctggtggctgtggggcttgaggttcctagaggttggggtgaactgaacctgtccatttttcttccccagaagagacagaaggagaagacaccacatgtcgatgtgggagccacgcagcagccacctgtatgtgtgtaccagtttgcgtgtttgtgagtggttacgtgtgggcgtgggacaatgtgtcattgtccttgccatagacaaagtggcactgggtgtgcatgtcagtgtgtggcttggtgtgtgtgtgtgtgttccgttcacatgatctgtggatatgccctctgcacctctcaacatttgcttatatcagcgtgtgtctacctttgtgaactgtgtgtttttcgctcttcagtctggcctgtgagtgggtatatgttgtgttagtgttggtgggtatacctctcacgtaggtagttgtgtacagctatgtgtgggcctcagcgaggatgcgtgtgggtacatgcgcgtgtccccttcacagtttgtaggtgtgcgcccacaggcacaggctcagggaggaggtaacttcccctccgcccagcgagccctctcccatgtgctctcctgcacttgtcatgttcatgatttcccgctgccccatgaatgctcctctaggcccctgggctgaaatgctcgatcgcagttttgagtatgagctgctggtggtctctgcacttagccttctctggcttttattagctattgtggaagagactcctagcactcttacttttgagggtgatatcaagactttttgtaataagtctgcctggcactcttcttacccttcaatggtatctgaccatttcagccctcattatcccgggctgtaacctgagagggaagggagatgagggggagaggaggaggaaagacctttgaccttgaatcaagggccgttgagtgtgtacaagcagatgccccgaaagcaaggagagcaggggagtgaagacgtggtaagcctgtggatggctgccccagcaggccctggggacttggaactcctcccagggttgatgcctacccagccctcagctactacaaagcagggattggagcagaaagtacctgggctgggaggcacctgcctgatgagctcctcacgtgtggcccgcctgctcctcgcatctttctgtgcttcctgtctgcaggtcctgggcactcccatttgcccccaccatgtgtcctgccctctcacatggcccctgtggccaccctccctgcctgcagcttctgggctctgaccgcggccctgccctttccccttggcaggagggagcggaggcgccggcaccacatgtccgtgtgggagcagcgtaccagccagctgaggaagcacatgcagatgtccagccaggaggccctcaacagagaggaggcgccgaccatgaacccgctcaaccccctcaacccgctcagctccctcaacccgctcaatgcccaccccagcctttatcggcgacccagggccattgagggcctggccctgggcctggccctggagaagttcgaggaggagcgcatcagccgtggggggtccctcaagggggatggaggggaccgatccagtgccctggacaaccagaggacccctttgtccctgggccagcgggagccaccatggctggccaggccctgtcatggaaactgtgacccgactcagcaggaggcagggggaggagaggctgtggtgacctttgaggaccgggccaggcacaggcagagccaacggcgcagccggcatcgccgcgtcaggacagaaggcaaggagtcctcttcagcctcccggagcaggtctgccagccaggaacgcagtctggatgaagccatgcccactgaaggggagaaggaccatgagctcaggggcaaccatggtgccaaggagccaacgatccaagaagagagagcccaggatttaaggaggtgagtgagtcacagggctcccagatggatggcacacaggctgctgttaggtgttcctcaatataagcctttctgagctccagtttcttctcctattataaaatggaaatgatgctgacacacactttgtgaggtatgaataaatataacaggcagtgggctctgtccccccaaaaacgagggcctgttggaagtgggtcgtggatagaaggatgggaataaggcagtggccatggcttgtgggtcttagcacctctctgcctgtctggttggggtggaaggcagtggtggccttgtaccttccaggctgcctgagcttccccgccttccccttgtgccaggcacacctgccatttggggacagcgtctgagcaccagctctctcttcctctctcttcacaggaccaacagtctgatggtgtccagaggctccgggctggcaggaggccttgatgaggctgacacccccctagtcctgccccatcctgagctggaagtggggaagcacgtggtgctgacggagcaggagccagaaggcagcagtgagcaggccctgctggggaatgtgcagctagacatgggccgggtcatcagccagagcgagcctgacctctcctgcatcacggccaacacggacaaggccaccaccgagagcaccagcgtcaccgtcgccatccccgacgtggaccccttggtggactcaaccgtggtgcacagtgagagcacagtccctgttcccctccacccccaactcctatcccatctggggctggggccatgacaataaagccacatggaaagcaccaccaggaggagtaaatcatccttcaagaagtaaaaatgagtggcggttttctcccagtgtgcagaacaaaaataagctagcgttctcttcatcttaaatttttcccataaaatttccccaggcttgttcctgtgaccaccctcaagtcttcagagtgatcacttgtgactttgtgcccagttagatattcagctgtttgctttggtgcatgaatatttgatggtgttgtctggggtctcccaggtgctctgctgccctggcaagttagggagcctctgatggagtggaccatggctctgctcactgagtgatcttggaaaaatctctgcatctcttgaggcctcagtttgtcatctgtaaagtgagagcattgtactagatgatctctgaggcctttccctgtactaacattttatatgattctattgctcttatcaactctttttctcctaggagcttttagccacaagttctccccatcacagttcccttaggcaacaaatgttaatcaatggtgtcctaaagggaaacacagccaaaaaaaaaagcacttccccacccctgccctgaccctacatcccatccctgtattcatcctaccccttatccttgccctgaccccataccccatccctgccctgaccccacagctcatccctgcattatgaattccacaccttatccttgccctgaccccataccccatccctgccctgaccccacacctcatccctgcattatgaattctacaccctatccttgccctgaccccacaccccatccctgcgctgaccccacacctcatccctgcattatgaattccacaccctacccttgccctgaccccatacccgatccctgccctgaccccacacctcatccctgcattatgaattccacaccctatccttgccctgaccccataccccatccctgccctgaccccacacctcatccctgcattatgaattccacaccctatccttgccctgaccccacaccccatccctgcgctgaccccacacctcatccctgcattatgaattccacaccctatccttgccctgaccccataccccatccctgctctggcctcatgatctctgtgcattaatcccacctgctgccccgtgatcactgaattgtgaccacaggattccagccttgctgttttcctctactttttctgtatttactctttcacatgaaaatcttttccctccctgtttttctttcttccatggctccctctccatttccgcatcttctctatagtcaacgtgccactgctacttcagaaagtgcaatctcccatgtccagtgcatgcttcagttgacttgggcatgtctcaggatcccagacccacagctcttttggtgtttgtttgctttaatacataagaagtgttttgggccttcttttatgagaaagaacataaagctttactctccctctgttgtaattccagagctagtctttggtcttggtcataggtaaaagcatgtgataggaaggcttttggatacttcttatgacttactctttaggaggcctgggcatgggccaggaccaccgaggtccactgctgacacagggttccagggtggagtcattcaatgagcagggagcagtgggcgagggtgactggggccctttccccactgtgacagcttcagcctcctgccagtttaacctacaccgtgtcttgagtatggaaacagagcagcagctgagagctcccctcgacctctggctccttcgtcctcccaatccttggatgcagtcatggacctatactcacatgaatattgcattctcatttctacattaaccatggccgagaaaagcacagccagaaagcctgctgcaaacagaatcatgatttcttgaaatcttccattgcagggtgattcaatgaaaggctataggattttgaattgggaacccatactagctgtatgaccttaggaatggtacttaaattgctagaactttagttttcccatctgtatcatgggagtaataatacatgccactgagggtatacccctcagtgggaaaattcagtaagtgagcatgtacaaagaatccagagtttagatataaaatctaaaccttgtgaattttataacagaaacatcatgttgtttatcagactgtaaaagttcaaccttaaaagtggaaacatgatcatggtcatttatatgacataaaaggttatttctcataacatttggggagggtaaaaataagaagagaagaggagtttaactcagtgtcaggtagtaaatacccccagtgcctgcagggcaccttgttagggacatccctggagccctttctcctcctctcctttcatccccaactaaacacaaatggtgccattttcacatgcctcatgatttctgaagatttcaacgtgttcctcttgcagttagcaacaagacggatggggaagccagtcccttgaaggaggcagagatcagagaggatgaggaggaggtggagaagaagaagcagaagaaggagaagcgtgagacaggcaaagccatggtgccccacagctcaatgttcatcttcagcaccaccaacccgtaagccaccctcgcgttgctccctctttagtgctagggtaaacggccaggtgtgaggcagggcagggtgaaggggagaggaaggatgggggcccagccatcttcttaagccttcctggtggagcatggccagacattgagcatctggggtgccccctaagtgaggtgggttggtaagttagtcagcctctgaactctgtgcccatagctgaaagagtaacatcgacaggagaacatgagaaatgtcattggaaaggaactctttaccagtctttggtcagtaggtagtgtggagggaggaaggaaatctacttgagattttgccaccaaatattccagaagtggatagagccaagaatgtggagcctagaatgaccagatcacctgttggagttgagaattttggtcacactgctctacatgtggagttttgaaatggtctgctctgagcatgctactcagagcagaggcagggacatgaagtgggggtgacagagcggagtctggaaggttagattcaggaaagatggaatttgggaagagcgttccagcagggctctgggaagggagcaacctgagttaaggcatgtgagccatccatggctagaatgcagaatatagaatacagttactttaaccagaataacctggggctcatgaaaactcattactgctttcgtcaggaattttagaatcaagatctctttttatgttttttggttctttgtaatttccttgggatgtcccagtttcctttcagtgggagagtagacatcgagatacagcagagggtgctatgcagctgccctgagttggtaggctgatgctggctgctccccatggctcagacgtgtctgtggataatgtatcttggcttgcgtgctgcagcctctaaccaatctgattaccttcctccactggggctttaaatcaagggtggtggctgagaaattaaattgctctccctggcggcttcctttggcaagggcctggctgtctggaaggggccaatatgtgtatgtgggagtgaggagtaagggcatgggcgtggtggggagtgggccagctcagccatgcccactgcccgcaggatccggagggcctgccactacatcgtgaacctgcgctactttgagatgtgcatcctcctggtgattgcagccagcagcatcgccctggcggcagaggaccccgtcctgaccaactcggagcgcaacaaagtgggtacacaggggccatgtgccagcctctgtagtgctctggtgctcaccccatcccagcactggaggtgaaccgagatggtagcaaggtttctggggaatgagcaagggttggaaattgtccactcctgttcctcagggcgaagtatgaaccattcccagacaagccccttcttagcccaacatactacaaggctctgccccaaaccggccagggctctgcagggctctgcagccacccatgggcttggatgtgggtctaatatagggtcatggatggtgtgtgtgaagctggcagctgcagctccaccacagggggccaaggcctctcctggggtcccacgggtatgtgtcaggagacatgagggacgcgaggaggacaggagctgacaaggatttcaggtcccgagcctgaactaagggacaggtatgtgggcaattcagacccaaaatgctaagttctggccaacgagagggagcagccaaggagtggccactgggtcacatggctccagcagggcccatgcccctccttctggcatttctctctcagtccagctagtggctctaattccaagcctttgttctgagggtgcagtgggtgagggccagggtgggcgtgcacgagtgcatgtgtcctggcaggtgggagctcatgtagtagcctgttggccacacatggtcatttccttccaccatatgtgtctttcaggtcctgaggtattttgactatgtgttcacgggcgtgttcacctttgagatggttataaaggtaaaaacttctagagaaaacctgggctcttgggtttagatgggtcacctgtctgctccttaggctagagcccttcctcagtgttaccacctaccagccaatggcagccctcagtagagcttctgccgccccttctctggcctcagaatcctgaagaaatctgtctcagcaagacacggctgcgtggatgtgtttgtactgctgcaggcctgtggacatggcccaagtaggaggcaggcaacagatgtgcagacagggttggggcctgcactcccctccccagtgcttgtcttggctgagcctgggtgtgtgccaaggcaaagggctaggtagagatgagtcttcctgggcttcatctagtcccagccaccacaacactccatagtctgtcttgttcccagcctcatccatccaggattttacccatctgtgcatatgtggcaatgcccagtgctctgagccataaatgaaaggaggaatgtgtcagggttctgtgacaaccaaggagtctagtgaaccctgggtgactatgagatgggggcctcaggactcagttatgtggagaaagcctgctggacctaacctctcattctccaggtcctagcatagggttggttgtggagacagtggcagtgggggcactgccatgatgaacagagctcaggtcaagtgttgcccacactttcttggctcactgtggctgttcatatccttctgcagatgatagaccaaggcttgatcctgcaggatgggtcctacttccgagacttgtggaacatcctggactttgtggtggtcgttggcgcattggtggcctttgctctggcgtaagtgactcttttcatatttgattcccttccttcccctcttcctggagactccagttgatttgaagccctttccagaaatgcaacatgcagggtgatgccaaagaatgcccccgctggaaatctgctccccagtcgcccccagcagagctcctgagcgccttgcagctccagctcacgtgacctgagtggcagaacgggggaagcaggagtagggagcgtcaggagggagaagtcagaggccctaggaattcctttcctagagatgagtaagcatgggcaggcactcacagtgtggacagtgtttccatgcattcagcaatggacccaggaacagcttatgggccctttctttcttgagtgtgtcaatcaaggaagcagcttgaaagaaagatgcagagggtagagcaaagttgaggatcacggaatcctaggcatggtgaggttttctattcatagcaggtgtaaacgagagctcttccagggatgccagaaccatgcttttgcacaaacctaataatatgtgtaatctccaaaaggaaaggctttccaaactttccttgataacatacctaggaaaacagtcttaaaccattcaggcaacaaaatcatgttcataatatttgtgggatttttttcccccctgcacatggatccagctctagccagttttcaatcacattctgacatttcctgtggaatctagccaaggaaagggctcttctagccctcctgggattaactaggaaatgggatgctttcagggcctttttcctaacccggtgtatagagtgtcccagtaggatgaatgacagcctcagggctctgtctgtaccttgttcaccctgagcagcttcagcctcttccaggaggcacaacagaattctcagagccatccctcaagtctctctgagtacaagtggaagcctcatctttaggctaagcaaggctagctacactgtgtagtgaggcaggagagctttcaggagcttctgtcattgatggcagctgcaaaaggaacacagtatcttcatacgtttacccttctgagtggttttccctccaagggtttgcccttccaagtgtttagaaagagatcacccttggaagggtttgcccttctaaatgtttagaaacacagggaagctgacagtgcttctccccaagcttctcttcaagcactgtcagctgctgtctcttatcctttctggcagaaaaacaggtgggataaaaattaccagatgtttctcaagtggcctggtgggggtggggatagtggagggctctctctctcttaaggagaggtacaagatacactcccagctgtgctaggagtgtaggatctcccagaccctggaactggactgtgtccactgcttcctcagccatgagagacccttcaaaagaaaaccacattgagcatagtttgtgactctaaaatgggctggtgatcaaggtaattccagtgtcccttgtccccttgtgcacatgttaattccattgtgtgcagtcacctttgtcccccacaaaaagaaagctttctgtcacatgtggctggactgttcttgaggaaattttacagaagcatggggtattttctcaagcatctgggccctgtctggattctcatggtgcaatgaaaggaaaggcagctctggctccaaaagagggacttccagctcctcttccgtcttcttggaaagaaggattaaagtctgcctttgccctaaggagacccaccttttttgttagagataaatattatccttaggtttttaaaaggtcaagttccctttcattttactaattcatttgcatagattattcactgtatcattcttcttattttgatctctaaaaatcatgtgtctctctttgaagtataaaggacaaagagatagaagcatataggaaagaacccaccccatctttaggaagaacagagcccactggcataacaggacagagtggcaagaaaggttgggctgtggaaccagacgggctcttgtttgaatcccagcccctctactttccagctttgtgtccttgagccacacagcaaaatattaaccctcctaacctcagttctcatctctgaaatgcagataaaataatgtgtgtaaagtgcttaggacggggcctgatgtagtgtgaacagtcaatacatgttgattcccctcctcatccttccattctcttatcacatcatgaaatccaaatataggaggaagtacatattgatgcacaatgtatacagatagatgtgtgcaggctggcccaagacctagttgttttatacagacacaccccccttgcctatgcccgtgtgcctggtaaccaggctggtgtgttggtgccagtgtgggaggaggtgtgttttagagggagctcctgcatgcctgcccattgtccacagtccagacatctctcctgagacccagagcagtgatgatgtgcagtagagctgtcatctgtcttgttctttctttgtgccctttgaaacatggcggtggtggctttggcgctggtggcaggggaagccttaacggccccggagctgaagcctctctgttggtcctcagaccaggtacagtgcaggggcccccaggaaccccctcgttctggggtccacacttatgtgatgtattgagagttatgatccatcacttgcttttagtcatgttacttcttgaactctctcttcattttctctgaaacatagatgatacttgctcacccttctccatccattttctcttttgccttcaacttcccaagcttgccatgcccattccctctcccctttctccgctcatggagcaggttcccactccccctcctttggccttcgtcacatttgctgagggaggtccaggtaatgctttctctcactcatgcacccatgctttctaactctgccctgttcctttcctcattaatcgtaccagagaattcagctctcccatcactttgatggggttagccagagtcccacctgccagcagagagagggcctggcctggggcagagagtgaaagaagtcactgagcctatattcctcatggtcaggggctcaggccagcagaaagccaaatgtggggttgtctgcaggcttgtcaagtatctctctccttgtgtttacaactttcgttatcatatcccatatatttgccccataatgtccaccattcaaataaccttattcctgtcccagtctctttctgcccttcttgaaattgaaccatgacttagtgaggaggcttctgtgaagcctattgcttaataaacttgagctatggtggttgccatggtagcatctttctgtggctcctcagaaaccagggctgacatggcattccttccaccacccagccagagccttctcagaccctggcccaactcccaggagcaaagcccctcaccgagtcgggggagtgacctctagctgaattctcaaacaaagctgtggtgtcccctgagccctcctgccgaggcgtgtgcctgccaccatgtatgttttctacaagcatatatgttgtttatgcagtggctgaagagaagactgttctccacagctgcatacatcaagttaagggaacgtttataatgtaaagctggaaaattccattagggaactttattgacttttgaggaggaagggaaggggattttttcatttgtttatttttcttcttggatttattttaagtgtgggcagagcagtggataaaaaaaataaatggaaagatacccacattgcaacttttctgttctttccaattcacttttacgttataaggcatttataagaacactcaggtctccttccttaagcccaccgtccctgcagggaggtgggcagagttttggcaaaggttgggttcagggcttcgttattccgctgccctgacaacacccgctttctgggccacatggagacagagtgtttgctgactataaatgtccagagctgtgccttctgtactttgaggtctcaagaaaagtctggtgagtggctggatctatgaaaccttcctcttttatctttttctttccaatgaagagggattcttttgtgtgatttcatgtgaaaggaccagaaaccgctttgtctagtttccacacaccctgttgccatcgctgctgcttcccagactcctgcatggaaggcaaagatggttacagccttggcatttctggggatctgcacatgaggcacattcccctgctttgggggaccctgctccccaaccaaagtcagctgccttgtagggaggtcacataaccactacacagattacattcatgaacctcacagaaccctcatgtttcatgtgtttcatgtctagtgaagtgacttgggcaaacaggtgggcagggacagcatctctggagaaatgtaggagaggaccaggacacctgtgcgtgtgtgtctttctgtgtgtgacacctgcactccaacccaggactctcaccctctccatttccactgctctacagcacgttacttgactagctcgattcacatgagcaggtgagcgctcctggattggattctaagtagtcatctcacagcttataattgatcgtcagcacagatggtttaatagaaaaataactagcaattctgctcccatctcctcccccacctcggaatttaccatggcccgtgcatcagtcagttacacaggctctctggcggctgacgccaaagcttcccattgccatttgctgttgtagcagggcatggggtgaggtcaggactccctggcactcaggagatttggctcacagccgcacttggcctttcattattcagtccttagccagaaacgaaaaacatgagtcaatctgcctcttgatgccagaaggaactggagttcccacattagcttttattacattcttttcattgaagtatgtcactttcctgacacttgacactctgccctagtcactgagatggataaggtccattgaatgcattcagcagtagctgtagcagcagagttatatacacaggcatggacaattttagatttggaaggatcctaaggagccacataatatgttcctctgggagctgggcgtggtggctcatgcctgtaaccccaacgagtcgggaggctgaggtgggaggattgtttaaggctgggagtttgagaatatggtcctctggttccggatttgcttgtgggattttgtgttttagaaggtgagaatgtgcacatgtaagaaagaggtggctattcagcaccaaaatgctcgtacacactcacgctcagcacagcatagaaacaacagacaaacatttcaccctaaacctggctgtttctttctcctattcttcactacctgcctgtgtctgaggcagtcccctcaaacctccagcgttgcctatgggtcttctttcttgacagaacttccctcttttcaaactgaaaggggagtcttccaaaggaagcagtgactgcacattaatcttggaggcaaaaaaagtggacgaagtcctgcttcatgcaaagaagacccatttaccactgagccagacaggtcatccagtgcccctgttctgtggaagagaacgaaggattaaaattaaatttagccgtcaagtagcccattaactgtggatttaggaggccagctgaaaaggaattggaaatttccaactgtaagcagataggaggattttgtttcctgacactccagtttaaaagtcacctcaagaatgactacatctgatttttgtgcccagacaaggacactaaggatgatcaatgcccatggacttttgaggtgcctactactatatcatagctgccttgaaaatggagtttgggagggagtaaggagggacagagtggcagccacatggagggagtgagtgtctgaaaggagataagtcctcagtctacctactcttggcattaagtctcagcatgcatattttttagtgaacgctggaaaatgtgttgtctgctgcatgtgacattggtactgctgaggaactgcctgtagaatattcactttgagacctttatcttatggaggcaatgggtgtgaacacccaagtattttttttttttttaattaacagcatgaaattgggagatggttggttgtaaatgggatctcagcccgtggccacagacccaagcaaaatgaaatgatccaatcagggaacactgccccatccacacggtaaccaacaaccaactagacccagatataaaatgcaccctgtgagccttcacaaccatgggaagagcccagtactgctggattagtggaaactcctcatagtgccctccagatttaaaagtagattttagagtaacttgagtcggaagacttcataatgggacttggggaccatcaacacagatcatgccagccaccttcctaatccacatgcacaggggcacagcctagcatttcaaattagtcttcagtgggacaagtgtattgggtggacttccaccagctccaaggccttcttagaaagatcagcagatgaggtgtctttgggtatgtttagaataagacaaaagagacaactaaatccactgttcaccagattgaataataaaactgctaggagacagttagatgctctgctctctcctgctgcttctcagtgtttggacaaaaacacctgccagttggagtatggtgctgtgtatagcaaaggagaaagcttgcaaaaggctctcgggagtgtgtgtgaggagctcgttgaggtccatgtgcaagagggaaaggattatgcaccacttagcatagagctagtgctctggtcacatgacaaagaaagatggcagaataacaatggattgagggttcgagggtgaccccaagaaatgctgaggcatggaccacgaggaaaaataaaccccaaatggtagccgctaagcagtgacaacgtcaaagtggtaaatttaaaattttcacagaagcagatgaacatatccttatctgcagatcctagagagacaggcactgccagtgcaaaaggggaaacttccccatggggtctttagaatttttaaagtgctttcacactctttattttatttatcaccgaacagtcctgttttacagttgagaagtggattgcctgaggtttgactagtctgactcatttgactagtaaatagcaaagccagttcttgagcaaccttggtgttctgatttgaagttcagtgttgtctccattatgttaagcgcccttctacacatcatgttctagttagctccaagcaattaacccctgtaagctaagagcagtggcttggtatagatctctcctcaacctacagatccttctgtctctacctggtgacagacaagacctatgggtagatggagaaggtcatccctgaacttgtccatcttgttgtttcatctgtaactttttttttcctaggaaccctcatagaccctaaactgattacagggaggggagtgtgatagcttagtatttgagatcaggaagtacttggtcttttactgtttccttctttggttaaaacgctccagtggttcccatttgaaaggcactctaacatcacaaataagagcatagatttcagagtcaggcacatttaggcctgaatcccagcactattattaaccgccttaactttgaacctctgcttcttcatctgtaaatggggattcaaaataatattttggtcctataagcattaaataaggtaaaatgtatttaatgtctgctatagtgccaaggacttagtaattgtataataaatgatagttattatttcctaccaaataatagtccagacacattagtgagacactcgaggctcctcacagcatgacccctccatctacctttcactcctgcgagcctggccattccctgaggcaagagattccttcagatccctgagctattccccgctcatggggtagggcagaaggccatggcacttaaaggacagaagggttctttagaacctgatgtccctgctctgccctcatgggaggagaatcagttcctggcagaaatcaacttgagagcatgtcctttgagaagagggggctgggaggtgaagagcgggattacattgaatgatgagtaattacacatgaaagatctggagggcagcttgacaattgagctggaaaattctcgtcttttactgatgaaacaagaaaaatctgtcatttttttttttttttttttactggagagcagccaggaacttaccaaataaatagaaaataaatggtaaaatgtgtggcccaattgagtcccaattaaagtgagaccagtgcatcctagtgtgtggaattgtccttagattttaacattagagtcaatttttgaacctgatagaaattttattaatgaggcagtgtaaaaatatctgattataatttagtatcagagactagcaaagtgttatcaaacagttacatttaaatgatttgtaaaatgcacgtgaattatttcctaaacaatgtgcctcaattaaggtacttgaagagctcatccttttagtttggtgaaatgtcttccttgcaatcttgttggctttgataatggcttaaatcactcttgtatgtatggatttgggagcagtactttggcctagtccatgtgtaaattatattttaactaatggggactaaagtgttgaggcgtttcttgactccagggctttgttattcagtactcttttcatttcaaatggcaattttaaaatcagttaaatcttgcccctgttaacaaaactgaggatgaaagcatatttttctgcagctattccaattcatagcttttcaatggctcctctgcagtaagagacctgatgaaagatgcgtagagcaatgactaattttatttttttttattttacttttggcctgtgtctgattgctatccttggctcagacctgtgggagttaggatgtgacaaatagcccccccagtggtttggcagccacgttcagctgttaagattagagtgtaccattaaggaaccctgttttccaaaacaagagacaatggtgagtttgcattataacatgccttatatggtatatgtggtaatacaatgaattataccatgatgctttactaggattctggggggaaattaattcaagagagcaaattatatcctttatccaggtgtgtgggaggagcaggaaatattgggccctcccgcagaagacgcatgtctatgagcatgacctctgagaaccttttcagatgctacaggatagaaaggtctccgagataaggacttgagctaagcagaaggcagaagcttggggtgtgtgatcctagatcacctgcccatatattgatctcccaccctattcttacatcttagagatatgaaagattatcccttagttcttccttaagacaaatgtagcctggggaaagggaaacctttgtggttattttggtaaattttttaattgatttcatttttcctatggcagcttgcagttatacttttattaatgtgcttgtttacttgaggtctatcttccctactagactaggtaagtttcaaaaggttggcaacctcatttgttcacaactgtatatccagtatgcagaacagtgcctgacatatattaaggactccacagatgcttggtatatggatgaataaagatgtgtttggctgacctaccatatgccctgtcttatatgtgagaagatgctggggaagatatttctgtcctctgaacatttagaggttatcacattaaggatttaaggtttataaggccttgggtctaattcccaagtcatgattcatttggcatttatagtgaaaattaatttaattttgaatatgggatcatttgttgagtaaaataaccattagaagtctttgcttgtgacatacagtagtggaacataggtttgccatacgttggcaaaaaataagaaaggaaagaaaaaaagtaaccttcatcacaatgtccaactaagaaccaaagcctgaattatgagcacttcttcttagcagcaggccaggatagggaatcatgagatgcaggttcacctatgtttctaaactcactcagtgaatgatcttaggcaaggcacttcctcctggggcctcagtttcctgtgcagttgggtggatttcagggatctcttccagctcagaaattcactgtgctgtttgacagaaccttgaactaaaacctgctgatgcagagccttagtggttaagagcaagagctttgatcatcatacatgcttgggttcatgtcccagctctgccagctgatgtcgggcactcaacctctctgaatctcttctgtgaaatggggatagtgattcctatgtgctaaagttaggaggtttaaataaagatttgcactaaaattgcttagcacagagtctggcccagaataaataaatattcaaaaaatttagaagttgtcattatttctatcttgaagatatttatgccctgacttattttaaatgcctcaccagtagaactgggatgatttttcaccttcaagctgcacagtatgctcacaatggactggcggtcatttaatttatcaaaaggcaaactttggtgtgacatcatgatcttgacagacaaatgcctccctcccttatttcaagttggtttaatggtgttgctcctctgagcttctaagagacatcagtgagtctctctctgagtggttgcgtgtccctctttagatgaaaccctttataagcataactgtgccagtgtgtgagagaatttctggcccagagtgggcatagttcctgcagcctggtttcttataaattcactggaaacagagtttgtctgaagactgcataggaaatgaaagtaaacgcctgcacttagaaaactgcagttaaaccagactccatggaaataacacacaatacccagaagtctatgtagaattgtcccttgtgctggcagagggccttcgcccctgcaggctgggacagtggcaatggagcaaatggtgtgctggcccttcctttcacaaaggtgtggacactctaagtgccaaggctgtgggtggggtcccctgggcctgtgctgctctgattccctatcattgtagggttctcttttctccctgaagtgttctgactgtctttcttctctctaccccaaccccatttttttgttttgttttattttgattttctactgctctctgattggatcctccataggaacgctttggggtaaatatgttcgattatctttgaagtaaacgatacaaggaatgagttggaggagcgagaaagtatggttgggaggggaggggctcacgcactgagaaaagagtggtcagtttttatttatatccaagggatcaaaattaggagtcaccaagccttcttgggaaatggtcattcttattggtttggatatgtattcggctcatatgttgcctcttttaggtatgtagacagatgagcctaatgcagtgaaatcgtttgtaaaacatgccaaagtctctggatgctaaagaccacatcagtgcaaggcttttggattatttatattcagatctgggattgaataaaagtgacttgtaggtcatggcctataatcattaagagagtcttaaaataaacattctgggcaaagtcagcattccttcaattcgattaaatatcttttggcctcgttttctgtgaaagaatggatggacttttatctccctgtcaggggggtggggtaggggggtaggtatcgcaggaaggtcagggggaaagcagccggaagccttgcagttcccacctgatgttctggaccccatttcctcagattgttggtgtaagagtaatctgggtcaacatgaagaaagagacagagcctgactccactatttagagtcttgttttccaccatttgtgtgttttataaatgacaactatttgaattgaatgcaaatatctcaggggatgaacagagaagaaagagaaatgcaaatgtatttgttcattttattcctaaaaataaaaagagaaacatactgtcactattaggagtaaacatttccaagaggctgactagggaggatcaatagctgtagggccaggataaaggtaggctgggcctgcagtttgggcctcctccagttgagtggctctctgcagcctgtgctaggtgcacaccatctgcaatggaagggactgcgggaacagccagccacacagaggtactggggtgtgagccaaggtcctagctagaagcctgcatgacatgctttctctggaacacgtggcccagtgagagtgtcatgtctgccaccctgcctcaccttgctgtctcctgaactaatgaactgtgcagcggtgacaaacccagattaagtctagtgccctgatgagacttgctctcaactgtgggttcatcaattcagcgaatatcatttgagaacctatcatttgacaagcactggattaggcacagtagggatctgaagtgggctactgctcacgttccctagttgatgtgtcttccgttttcattgtgccagtgtggtaatcagcagcattagactggtagttagggaaggaagtgtttattaacatatgtgcatggatgcctctgtgtgcctgtatgttcctctgtgtgtgtatatatgagtgtgtacgtgcatgtggatgtgtgttcatgcgtgcacactgggaagtgatttgagaatattcctgaagcatttttcgcaggatgtccctggagtcaaatctgactcagtttctggcttcttgcctccatctctcccatacatctctccccttttagcctgttgttactaatgccatagtttgaatgtcatttttatttctcccccattccatatgattccctgggggcctctcccctgcagaaccaacaaaggacgggacatcaagaccatcaagtctctgcgggtgctccgagttctaaggccactgaaaaccatcaagcgcttgcccaagctcaaggtagtgtttacagagtttgttcccatcaaatccccttctcccatcttctctctttagccatggctggcctgcctttggagaatttgttctgggaatattcctttttctcacacggatatcgaagttcttttcatctgcctgagctaaaggtcttagtttcaaaggaaaataaccaacatcccaagaaatctataagaaagctttttcttttaagttcagacccagatggtgtcttctctccggtgtgatatgtcatccaagagggaatcctgtgtggctttgtcctggggcctcctatgtctatgtccccagtgcagacccagaacaccagaatggaagcaacgggatccctctgtgtgttctggtctgcatattttttaaggccgagtatcctgggacattttctttttcttataactcaagaggagaagaggctcttctagccctacccttcataattttgaggcacagataggtcagtaacttgtccaaggacatgcagtccatttttggcagaggcagagaagaaatgggaagtgagctgacatgaattaagttcttcctattgccaggacctttactaggtatcttacccagatttctccttgtctaatatgctccctcctcaactcccctggggttccaccttccacgagtctccctgcctctcaggaaagcttcctgcactctatcacacaattctgctagactgttgaacccacctgccccaccccgcatactttgctgttagtggaagctgaggctccatgggaggaaagttctttctctctgaattcctgtgaatgacagcaaggcactgccagggagaggaccagagctcctggtttccagccccaaagtctttctgctgctcaggccacatagccagtcaagccccatcttcaggggctacaccagaatacttcccagcaagcagactcaattccctaacttcagcatcacatggaatcatgcagtgcttctcaaggtgtgggtcataggccacctgcatcaggatcacctgggtacttcttaaaatccagattgctgacaaccgcaacacaacagagccagactccctgtgggaggggcttggagtgcgcctcctaaacgggcttcccaggtgactcttagaatatagtgtagtttgagaacccctgtcaatattaaaaagaacccacttgagtgcgaggctcagctctaggacttagaagctatatgacccagggcaaattacttattctttgactttctttcacatgggaaatgaggacacattgtaactcatacatctgtggtgtggagaaaatgaactgacgtgagtggtccctgttagaaaactcaacagttcctctggaatgcctgggcctgctctcccaagcctgccacggaggacacagcttggggagggctcttgtgcacttggctctcccttgcttctcaattcccacttcctattgaattctcatcacctctgatactctttgcccacgcctaccccagacctccttcaggcctcatagcactgcttccctttcagccatttagctctgcagagaggaggcaaaactaactaggtttgtgaaacagaagaaaagtcacttctgagaggccccgatgtgactgaaacctggctacctttcagagcccagggccctggcccaccgcgtgggttcccagagagagacacccatgctcccaaggaagtggcctggccgactgctgtcctccctggctaccccgccttcccccctggaggaagcacttctcacaatgtcagctgtttcttaccaccttcctgcccataaatgctcattgggttctgcctcacacacagagcgtggccaggctgccttgggccctgacccttatcagtattgtcagtgatcctgcagggcaggattcagtgggcctcaaggagagtgcagacaagcttgatgagattcgttaataggccagagaaagcaccctgcaacctggcttaattctgttaaattagaaagggctagttcctcgctctgcagctccataacctgagagagacgtaggtggctctgatgattccacaagggtgcctgtcacttacattccctgcagtgttgaactaattaaaccagcagtgcttcacccagtgctgcaaagaagcaactgcacaaatgcagcaccaccgtggggctagattgtcctgtgagctaaacctaaaaacctagaaaataacctgaaaatgccctgcaatgtattgaattcccatgtaactcctcacagcttagggcctagagtggaggtctctggaggtctgttgccttttaactgaagtgtaagtccctagttctatctacccagcctcgccatctctaagagaaggtgtctattggtctttcccacattacttctattggtcttcatcccaaatgcagccaccttcactagagaacatttacatgaagtgctgaatataatcataaatgtatgaacttgcctatgaaatattagtgaaatgaacaaagatgatagtgtattattacctgatccttttagaaaggtaaggagaaaacaatacataatcagtatataaatcgaatctaagaacgtcaccaaataaagcacaagctatttaaagactaaaattggctaaatgatctcaaatattccttccagctatacacttctatgcttcacactaagtggagtacccgtaccaggatcacacagaggaccgcattccttgcttgatatcatctgatttctactgcgttgggtctacattcagtttcagaacatgtgttcccatcccaggtggtaggtccttgcagtcataaccagcttagaagccagcccttaatctcatgagcaccacctcacctcttagcaggaaattctctcctgggacaacttcttggtggggctgggtagtggtggtatggcccagctcggctctaggcaagtatgcagaccatcacagggttcacacagcagggctgtttgctctgtccacaggccgtcttcgactgcgtagtgacctccttgaagaatgtcttcaacatactcattgtgtacaagctcttcatgttcatctttgctgtcatcgcagttcagctcttcaagggaaagttcttttattgcacggacagttccaaggacacagagaaggagtgcatgtaagtgccaccagcgcattccacttgattttgctgaagcatgtcctgatgatcccactccaccaccacaggtccaccctccctcctttctatcttacccatctctgctcttctttcagcaaaaagacaaaatggaatcaataaactttttactgagtgcctcttttgtgtcagacacgaaaacttgagtgtaaaatatctcgtaccatgacattttacactcgagttttcatttcaaacccctataaccagctattgaaataagttttatttgcttattatacaagtggaagctaagactcagaaagtttaagcaagttgctcaaggttacacagccagtagtgaaagggttaggatttactcctgtatctgttgggcaccaaatcccatttttgctccatggtaaaaataccttcctttaatagaattccttttgccttacacatgtatggtgatcattattacccccacattattgcggcctgtagaatgtgctgactcttctgtagaatgagctatagtgaggaggctctctttcatttctgctctggttttagaggcaactatgtagatcatgagaaaaacaagatggaggtgaagggccgggaatggaagcgccatgaattccactacgacaacattatctgggccctgctgaccctcttcaccgtctccacaggggaaggatggcctcagtgagtgattgagttgtcatgcttgtctgtggctgtgataggacccctggttgccttgagaagctgactcaagatgaacaaggctcacgctttgttattgtatcagggaaagtaaggggttttgagaaggtgacacaggcagaaaagaggaagaatgaaaattcttcaggcaaaaatagagaagtgggtgagcaaatcaggaaaatatttgaaactcttaatgttttagccaattattgaggagtcaagtggagccatctgacttctatggaacaaatgagttttgaacagccctgtacccataaggagaattcctgagagctgttatagacagatttatcctccaggggggcccagcacctgaaagcctgaggattgagggttaagaatgagttggcaaaacccaaaggcacctcctgtgatcatgaggaagaccacagaatgcaggtcttatgctgcccgtagttgaaagctaatttctcagagacttagcaatgactaagacaccactctctagtggcaacaggttctacttggcagcaaaatgttaaatgggaatctgggagtctctttgtattgaacatgacaacctaaactatgaaatggtgtccctctgttgcttaggagttgagtgcgtgatggaacagaggctagaaagagaagtggattgttgatagcaggatatgacaacttgggtttggactcaaaaaaaattaatggaggatctgcaaagtcaaagaagtcagataaaaaattataataggtggcacatttcctaacgaagccaagactgtcatccaccatctgtgccctcttgttctgtccccatagagttctgcagcactctgtagatgtgacagaggaagaccgaggcccaagccgcagcaaccgcatggagatgtctatcttttatgtagtctactttgtggtcttccccttcttctttgtcaatatctttgtggctctcatcatcatcaccttccaggagcaaggggataagatgatggaggagtgcagcctggagaagaatgaggtaatgacaattggtctaaagtggggagcagcagaggctccagaaaggattcttgggccagcaatgtaagaaaggaggactgcattttcttaacttgattaagaattatagagagaagatgggaaaagtaactattcagccattaaataaacattttccaagcactgtttaaggcccacgtatgaggcacggagatctggaagatatgtaagatgtttaacatgcagtctttacctttgtgtgcacatagtctagaaaacaatgataacttcagatatctgcttatctgactgtgaccttccatgccatgtacttgctgtaagggcagggaatgtgtcttatcgcagcttttccagcaacaagcatagttctggcacattgtaaggtttcaaaagctgtttttgaaatttctttattttattttattttttcgatggaactgaactagaaactgttagggactgtaagagaaatgcgacataaagtgctgtagaaatacataggtaggtagatctttacttctgactaaggacatcaaggaaggattcctgcctaaacagctcagccacatgctgtgtaaaggacttttttaataaccatgaagtccctactccatgtggcaacacctccagttttgtgtactcctttaaggtgacgccttgtctgtagttttgtccaagtgaccccagttgccatctttacttgcccagccctgccctttttcccattcaccgtcctcctcttctgagcatggaacagagcctgccatggtagatctaggggatttgaatttgtgctaataaccatgactttcttgcagagggcgtgcatcgacttcgccatcagcgccaaacctctcacccgctacatgccgcagaacagacacaccttccagtaccgcgtgtggcactttgtggtgtctccgtcctttgagtacaccattatggccatgatcgccttgaatactgttgtgctgatgatgaaggtgagaggagagaggcacaagagccaactgagccccagcgatggttccctcccagggcaagtgggaagacaccccaacatcccagcccatcactgctttacctacttttccatcattgaatccttttgtgatcttattttgttcaataacccaacctctggggctttgggggtccactgagcaaaatgcagtgcagactatagtagccatccaggggctcccaagacctgagatggcaatgggaggcagcttcagacaagggtggaaaaatcaggagacagagatccatcatcacggggtctaaaggagccttggagtattcagagaggctcatcctatttaatactaaatgactaactccagtaactaactctagaaaatgtttcttccctgcccaccctcatctctaggaagactggctgttttgctattaagtctggtggggcgtgggtctgtgttttcctttgttttgttgggtagaatatgtggttctcctctccagcactcgaagtccatctctcctcctgtaccacacaccagagtgtcccacagggcaggaatgagagatggccaacctcagtgacatgtattccccctcttaccttaaggctgtgattctttctctcttcttttttcttcctggcagtattattctgctccctgtacctatgagctggccctgaagtacctgaatatcgccttcaccatggtgttttccctggaatgtgtcctgaaggtcatcgcttttggctttttggtatgttgctgaatccttcccagcactgggcttgtctctttctgttgggtgccttcccagtctttgttgaaggggaggtggttactgctattccagaaatcacccacctagatgtgggctcgttttgactgctcagtaaactgccgtagagacaagatgatgtgtgaggaagctgggagaaagggcaaaggaagccacagccatcagcctggtcctgtgaaattctgtcagcagtccagaggcggccatcattgagtttcactagaactgcaatttatgtgtagatgaaggaggaagccaaagattggactaataaacttcgagtgcttatttactggtaaaaggtataacagttttataacacaaatgggaaaataactatctctcttagcctcaaacatagcaaataatagatttttacctattagtccttctgccattagtaacatgaagagtaatttctgccaaagaaaataggtgtttattacttatgcctataaaggctaatgacctttaaggggtgtgtctgtgtgtgtgtgtgtgtgtgtgtgtgtgtgtatggagtgcaaggggaaggattctggaattaagtttgaggaggtttggggatgatgaatttttctgccatgagccctcttttttcttctcctcaactactattaataattataattgttgggcaaattcttgcatctgtcctcaagagtgttaagaaaatccagcccttggcttcagtgccctataaacaagataatccccttggccaccctccccccaacctgcttcattgtgtgcagcaagttcagtgggatgcaagcccatgtgacagctgtttcacacttacttaggacgtgagctaccatttcaaattacatgtgtgtatggctttccctgcaaggaggagaactttgctcattatctgaataagtgtttgtctggtagcagctttaacagagactctgggctgggttcgataattgtgagtgttgattacgggggctgcttttggtctcccagcggttctttgaaaaaccattaatttgatcattttgggtggagagtttaagggaaccaattgcagttggctgcattgtgtttgcctggctcccttttgagtgttttgagacttggggaaataaaaaagtaaaagaaactactaccaacaaagatgcctttataatacagtctagccctgagcagggggagctgagagagagggagacgcaagcaccacaacagggaaattttttctatgcatgttgattacttgtatgtggtattgacattgtctgtgacttaagtcccattatgtgtctaattatggtgagtgctgaatatatactcacagccttaactagattcggcccttgaagcctgcctccttcccaccctacccccatgttttcattcaaggtctagagggattttcactctgtaaaaggtaccactaattctgataagtctttacattgttaaggcactctaagctttcagaatattgtaatatatactatttcgttagatcttctcagtgactctgaaataggcatggcagatgtcactatcataattgccattattgttgttgttattttaaatgaggaaattgaagttcagaaaaattgtatagcttcttaaagattacacaatgaaaggcaatagaattgcaaggctaaatgggaataaaaagggaagggaaaaagaaaaagagggaaagatgtaacaacaattggttggctattaagtaccaaatgctttacatattgcttttctctccataacaatatattaaataagcattcttattttctcctttttatggatgagctggagctcagaaaggttgaatactttggccaagattagtaagaggtagggccaggattcagaccctgttctatctgacttcaaagctcacaataatctagtctacactgcactgtactattctataccatataccagtgttctagtctataccacagcatgctattctgtattgtaaagcattgttaactggaatccagagcttctggtcctctgagacctagatccatgcaccaaggtttagaaagaattaaaaccaagaattaggaagttcaccccaggttggacaataggagagccctgagaattgaggaattcggagacttaatttagctccaccactgatagactaaatattctaatggaaagtgaatttatgaaactgtgtgattcagtctgtccatatgccccataggtacatgtggctttgtaataaggcctctttcagcctcattttctcatacataaaatgaggataatagtagctaccttatggccttagctactttgttgtatgtatccaattaagtgatgttcataaccttctgagtgggtgttcattaaatgtaacttctctctctccacattccttttctttctttattgggtattttcccccaactcctcttgccaactcttccattcaggactttatgaacatgggatatttttcaatccctgcctctaggatccatgagaagaataaatgagttgaaagaatgccaaaggcctggcctagtgtctggctcatgtaggaattcaatgatgctagttgtgaggctgggttggagtatacttctgcagtgctctgagagtctcttgtgttttattccaaggatagaataaaataatccattgtcctgtgatgttgctgaggatatcaattacaggtgtttgaaattttctcctcctggtactttctctgtctcctctgaatttctttattctgttgatttaaatctctgttttctgtgttacagactgccctttaaatgtcccaggggcaggcaagtgaattgtttttgagattcaagtgtcctttttgtttgtttttaaaggaacatagtctaaggtctgtgttcatctgagcctaggagatggatgcatagtccaccctctcctgttaaatggagtgttatctggttggtggattttccaggctctttatatctccttcagcccactcattgtattactgcttccttgtacttagttacatctcctcaaaagatgtaacagcagagaaagagtggaaagatgaagtctatttatcctattaccaatcagtagttggtttgaaaaggctcaatggagttaggaggagatttttggcacatctgtaaccttcagtcacttatgacttgtgtgacttttgttgatagttgaaagtcagactgtattttatagggcacttgacgcaatagagataatttaaaagttatagctgtatgaccatggcaatggtttcacaggtacaaacgtttccccaaacccatcaagatatagccattaaatatggatagctttttatttgtcaatcatgcctccatagaggtttttaaatacataaatatttgttaaaaataaaaattgaaaaaaactttttttacatatgagcttttggtgacagttttcaaagataaagtcttcaaatagtgatagaactgctttccaaatgagaaatttccagattagtaaaggagaaatggcatctctggttagaaatgggaaactgaagccaaagtaagagtgaacttatgcattaattgacaagttttatttccaagggacaaacaaagttatataatgaaagatgtcttttctccttttttttttctttccttttctgatgttcctatgactgaattcatttggcagaactatttccgagacacctggaatatctttgacttcatcaccgtgattggcagtatcacagaaattatcctgacagacagcaaggtgaatggcttataagatccatgtctgtaagcttggccctggagtagcatttttaaaactcctctgtatattcagtccatttttaacccaccaaagcaaatgcgtacccctctaagtgttgggaatttactcccttgctgcttggcatcagccagggaatgcaaacttgggagtggcactggatctccaggaaggctttgttgatttgcctgactcaggcagcagacctctaatggggtaggtgggatagacggtgtcagaagagagctagtatgcatagcgttgcactagagtctcaaaggaggcacagtatctttgccctcaaagttcacagacctgtattttttccataaacttgttccttctaaagatgacttggagagctcagggtaactctctttgaatattagagggccagcgtgtgctagaggggttcctagatctgctctttttggcatttaagtgcagacttcaggccactcagtagaagactagggaggctggttttgtgtgcagggtacccttctccagtacatcctttacccttctacctggggatagagagcaggcatgggaaggcttaggagatgggcctcactggccagcccatcagctggaattggggttaacaaagacagagactgtgtcccatttatcggaatgagggataaatacacaaatactagtgcttagatttttctaaatcaccataatgttcctaattatatgtttccttttggtccaccagctggtgaacaccagtggcttcaatatgagctttctgaagctcttccgagctgcccgcctcataaagctcctgcgtcagggctataccatacgcattttgctgtggacctttgtgcagtcctttaaggtaagaggtaccagcaaatcctctctgagggttgtcatatcagacagtacagccaggcaacactggcatcattacccaagtcccttcacctctgggaagctgaagctagtagaacgggtgtttgttagaagcattcagtaaatactgcaattcttagttacagcacagcttggcttgactgggatcagcttatgtctactggatagaatcttattttagaaaaacaccttgactttgtgactcaggcatcctctctgtctgctgaggcaggggacacattttataagatgtgcttcatccatagagattccagacagtcctgagtaaccccatccatgtaaagagccagccatctgtagtcagatgtcctctgcattttcagggactttgggtgtttgtttttatttcacatgaaagtttttcaaaggactcattgagttgtgtttcatagagagatgattcatacttagccccacctttgtcttcatcagtgtttatttcctgagccactgaacacagggtatactaatggccacctctgtgtcctacaaataaatagggacatctgggcaggttaatatgatgtgtttcctctgcacagtctcgtggagctgtacagaggtgtacatatgataaatataagtaaaaaattgacagctgagacccagactttgagtaaaagtttcttaaacatactgaaatatctttggactctagcaaatatcataaattagttgtttttaagctttggggggcctaaatgttgttcaaatgcctgttcttaccaaaatgagtttttcagtgaatgtgtttaaaaataaatttgatggaattaagtgattcaaagatgagaaattatgaattcaccaaattgactttcttattttaattatttatagtttaattaaaaattaagctaaagaaggcaagccagtgaattcatggtttctcatcacttggaaaaggatttctccccacatccatcattactgatttacttcttcatcgaggacctgggattttgagatgtgagatcaattttaaggatgttctggctcctaggagcgaccttgacactttttatcatatccagagaaagtgtttggcgtaatgactcccacgaggcctcacttcaatgaaaactatttttctaaagttagatatggaggataaatctaaaaccttagtgagaattttctgagtctcaggtgattttggatttagaattggaaacacaacatgcttttaaaaccttttttttttagaggattgcccaacaaacttcagtggttagtcttttaagaaatatgtgtcatcctgtcatattatcacaatcaccaagtctctgagaaaccatacactattgagggcaaagaaaatattgtcaaaaattgatggccaaatggttggcttattccagcaaatactacagagaacagggaagacaggtgaatttgcctccaggtgacactgtgttatagatagatgttcccttttcagaacagttctgtgacacagtatagaagtttgatttttaaaagtcagattaacaaagactacctctgcaaatagaaagcagagagccacacgatataaagagcatcgccattgcctatacctcccccaccctccctaaacagcatccagttttctacctctgacccctactctagagttcttccctcttttcccttattttgtgttagaatgtataaacatgacaagaaaggaaaacagaatgaatctttgcttttctccctacattgggagtagggagagataaactagggactagagtggagacagtagaataagggcagaaggtaaagatgaaaggtagcagcactgcaggcacaagaaaccctgtccttccttctggctttctgtagaggaggtccacattgcccatcaaagtgtagtcaacccccatcacagagcctaggaatcaacacttcattggagagggaattctcccacccactttcagttgcattttaattttagcctctcttcaagttgtaaatagtctcatagggctcttcattttgttagtgctgttgaaaagctctgccctgctcatgcagtctgaaagcctcaattgatctcctgggattcatgatgtgcacaatcaagacagggtggagactcctcgtagcactgtctgccagggagcttagtggatggtaaagaagagggacttctctggcagcgctgagatcaacgcaaaattacagtgtcccactctggccccaaatccaaactgtcctatgtctgcatcctcctccagtaccaaggccagttccctgcctcatatctccttgccttgaccctcacctctaaaactgaaatgttatcccaaagtggcaataagcatgcgcagtatggaattttgtgccacatggcttcatggcagagttttttggtggctaacttaccaggcttttgcatgaaacataataaaacgccaggaggcttaaatactgggaaatgacatttcatcagaaaatgaatgacctttctaggaacttacaaacaagtgagaccccaatcatttcactttgattccagattcttcattatgggtgccactttgggtatgggagtgggagggggtaatacagggatttggaagccaaagctaggtgcttcatatttaatttgcatcacaattgctaggttattaattttctgcatggcaagtgggatgaaccccaagcccaggaagttttcccagctttccttctagatatgggctacatttatgggtgagtgaatctccctgatagaggtaaattttaagcctccctttggccaactgtttacctatctgtcagaggacaaggatgcctgagaaagtactacacctcaaaacagaacaaccccagggaatagggagtcccagtctgtgtttgcattagcctccaggcaagatcctgtactgccggtgactgcaggttgttgagcttgggtgctgcttttctttgattaacgtcttatctctgctttccttccaggccctcccttatgtctgccttttaattgccatgcttttcttcatttatgccatcattgggatgcaggtgagctggtaaatcaagggcccggtgggggacagctgttacccagataatctctggcttagcaacctaagcatgcaagacctgaagatgctttgaaccccttcttgcctaagggtgctcccctgaggtcttgtcacagtgtgaccttgggaatttcacatgtgcagtggctccccattttagcttgcctaagtattcagggtagtctggtacaggggcttcatctcaggttgtcagatcatggtgctaattcataagcagctgggcttctgtggtgacagccatagaactaaagcaaagatgacaccattgttcttagccagaaagatcccccaggagactaaggatctatttctcaggatctctggtattttgacttggcctaaaagaaggtcagatgttagttcttcctgtatatggtgacaccaaatcaccacatatagtcatggctgtcttatagagtcttatacttacacagtcttgactggctgagatttatgccctaagatacatcactgtgaacaactcatggagttcctggcagcccgttcattcctagggagactcaagggccacattccagctaattaggccatgcaacttcctggacagttcccttgttttcccatcccaggtatttatgcaggtagccagaggcctactaagcagaagaagccaaaggatctttcaaagatgatggtggttcttggtgggtgaattcctactgtaaataaccagcagcacatcccatgaacctatctggttggagacacaggctttctgcttgtctccagagggctaactttctgacttggagatattgtgactagatcccagcatagaacttcggctatgtgacagcctcctgcagtcaggcagtctggctgccttgggcctgctggctgccttcccaactgtgttgccacctggagctgctgctggagtgtcccagccttgctgtgtctgcagccttttccagaccctttctgaaatgtctcttcctttcactcttctctcttgcctgtacttcttggtttcattctttaactctattactggagaattttgttctctaaaaatacaatagaatgtcaagtgtcaaaatgtgtgagacttggttgagaagtagtgggttctccttcactgaggatatttcagtaggaatttaatgatcatgttggcagtgttggaaatagaattcctgctgaagtttcatattggctttgtaacgttcatgaagtcctgtctaactccaatatatttgattctggaattaaaatattcttgaagagccaaatgaaagcttgatttaaattattttttcaaaattgattttttattgatgtataattgtagatatttttggggtacatgtgataatttgatgctcgtatacaatgtgtaatgatcaaatcagggtaattggtttatccatcacctcaaacatttatatcttatttatgttggaaacattataattcttctcatctggttatcatgaagttccttttgcctatgctcaaaatagttcttaccccttttcatcttcaaataaaataaactagaataacaccatctccagtactgatctggtatgaatattgttgattctgataatggtgataatgctgtttatcattatttaaattccttggtgtacaagacgctgtactaaatgtatgcatagagagagagtgaggggggagaaagggagggagtgaaaggaagagagagtgagcatgtccaggcaagacatatgactaatgtttctgagtaatgtgaaaacgtttataggtgagtttcattgtctccattgatgcttagcatagttaagtaacttataacatgctcaagttctcagacagtaagtgaaagaggtgagttgtaagatcagctctgtctgctccctagcccatgttcataactctatactgtgtctcatcccaccagacaagcagacacaagtatttatttttaccctctagttggaggtagaagttgttcaattatgaaattgtagtcttcacaataactgtatggtctaacatcttattcccctcagatttctttccaaaggataatagcaccatgtccattccacagagacatgaatgacatttctgctatgacttgctttgagctggccatccccatcctggtctatgacagagacacagcaccaagcacaaagcagacacctgagcttgttgctagagagactgtttctaatatagtcacaacaaaactgagggatctgtacaaataataaacgcaagggcagagacaagcttttggaaaaatattaatagcaacaaggtatgtctatgagaaaaaccattattattccaaactttcaaaggcgccttggaaaaagggacctttgcagaagaatcggaagttcgaaaggaggagtaacttgctggggatgagaaagagccctgtggctacgtggtgtcaggaagtgggattgtcagcctcagctccttcactgaacaactgtgtgaacttggtgaagtcactgtatctctcttcaccttaactccctcaccagtacagtggaggtgttggttagagaccttcacaagtctcttctagttctaaagttctgtaatcccaactgaaatggatttaaatctatactctcatgagatttttctatgaggcctcagcatcccttctttctcttccataccctgttgatggaggtttaagttagtgacaaggactaagtgaaaagttgaaaaaaaaaaaaagtacaaaaaatttaagaacatcttcacaataaatatgtgtttttgacttaaattatgtttgttttgttctgctttttggttttttttttttgtaaagatgaggtctcactgtgttgcccaggcttgtcttgaactcctgggctcaagcagtcctctcacctcagccccacaaagtgctgggattacaggtgtgagccaccatgcccggcttgacttgacttaaattatcttagattcaaaataaatagttttggtttcttggactattacacacatactttgtgcaaaatcgcagtgtgctctgcagttagtttgtgattggatgaggtgtttgagaaaatcataatgaattcaactcatgatacctccagaagtgtcatagggaaaaaagacactgtaagttgtatgtctgtggtgaatcagggataaatcatgaattccaaaccaagagggaagaagagggcaggaaatgtgaacagggcaaggataaatgtcagtgccctcctggggtatccagagttaattagatttgactgcttgggtgggattttttaaatgctactatttgtctctttggggccctctagcttcttcttctctttccattcttctctgctgctgcctcacttgccacctccattctccctgagagacaagtagtatttgggttttgaaaaacagcattgagaacaaattcccagagcaggtgtcagtgggagttacttgagcaaaatagctgggggcagagattgttcctcaattgcacattctaaaaactgtgagggggaaaatgtgttccatttagcatacattggataaactgaagcatgttcaatgcaggctgaaaattgtctcaaatgactggaaaagtaacccagtaagtccgcgattgtctcaacattgacttgtgagaataggtcctgatacccaaaatgtggttggggaaggagggtgcatgtgaaagcctccttttcatctgaagagtggaggggttgaccttggctccaggcagtgctgtgtctgggagttcatcattactcagtctctgtggataaagatctctgagtgttccctcttttgaatgttcacagtgattacattctaagctcagtagccagcagcagatcagcaaatctcattctgtcacccagaatctgcccaaagccattttctgttttccttttcaaagtgcccagttggcccgactttctccatcctattggcctggacttcattttagctcctgcataaatgtttccttttggatgggatttgggtctgttggatgatacatgtggacatatataaatatatgcatgtggatatatgtgtgttcaatctcatagattctacattaatgacatacagaccttctaagatgtgactcaatggatagaaacatatctaaggaagatagagatgccactctctaacctgatctgcttgtaaattgcagggtggcatctgcccaagccataaatgatgtcttcttgcaaatctgaatgctcccatcatgactacctgagacaggaagagaggggtagctccttctgtgcactcctgctgtgagataatgtctttgacagacgcttgagtaccatggtgacaggtaccatggaactaaaagaccagattaggtgtaggaggaactatgtacaggcagaatgacttcaaaagagcttgcgttctacgttatgctcggaccttgctgcatgggtcccctttgctgcactagagcagtggaggataattattcttgcatatcagcccaaaagcacagtatccagcagctctctgggtctgagttgtctgcttcaggggtaggtcatcgggaagagccatgcaagtggctttgccaaccctcatgtgctggacacatcacacagcttggtaatgctcactgttttctgttgtttctctcctcaaggtatttggaaacataaaattagacgaggagagtcacatcaaccggcacaacaacttccggagtttctttgggtccctaatgctactcttcaggtacctggatgcgtaactgtcatagctggggttctcctgatggagggagagagagtttgtctgcctcttcctcccatttccctttgtatctttattccacttcctttgctcctgtcagtagaaaggggaacaggcaatgtctttgccaaactgcccctataacattagacagttttgtcttgtctacagccataccaccatgaatgtgcctgatcttgtctgatcttggaagctaagcagggttgggtctgctaaatacttgggtgggagaaaatttcatcaatgtctttggctcagcagttaatttgcaaattttaacttcaacatggcctgcaagggtttgggaggggggaatgtcaggacagtgtttgcagaccaaattccacttaagggctgaaaccttagatagccaggtttatgctgggtcttagagaatcccatgactagtagcagagaccccataaaagatggagacgcagtggatggggtagcagaacccaaaacagacctcagtgggactctttatctctgcatggaaagcactagaaggggtcaactgggtaaaaagagagcctgttgggcccagacaagagcgaggatggggaaattgggaaagaggaccaagaatatgataggatctgcagagctgctcctgctaaccaaaatgtctcttgggctcaggagtgccacaggtgaggcctggcaggagattatgctgtcatgccttggggagaagggctgtgagcctgacaccaccgcaccatcagggcagaacgagaacgaacgctgcggcaccgatctggcctacgtgtactttgtctccttcatcttcttctgctccttcttggtgagcaacattgtgcttttgccttgctatgtggcccatcccatcctacccctaaccctctgatacatagaccggagatgtttgcttcagtgtatgtttgtgcctccctcccctcctctctccacacccccaccatgcacacactcacactcacgtccacacccaggttaagaactagatcatcctctggagaactcttggagattagagtgcctgtcagactcctggatgggtgactttcaatgattgagaaaagtctttgttggttctagggaaagattgttgtgaaaagggaaggtgagcatatttaagtgcattgagcttcatatcgaatctatggacactcagagtaatcctttgtcatacctcaggtattttatcttataagtacgtctatggatatcttcgctttgggagatttttgaactgcttgagaaaaggtaccttgaaaatgcaaggttatggcattgataagagtagaatgatgataatggaataaatgtggttctctcttgacttgtaatgttattacatttgatgataattgaccagctgatagatgagaaagaatgagattgcttgattgctttgggtgttagtaaatattgagtagtatatgtggagcatacccacctataaagtggtgggaagccctacgtgcctctgaagtctcttttggagaaagcatgactcagcacacccacttccagaaacttctaccctgcatatcagacaagcagtgataaatagaataataaaagggccagtttagtgtttctggtcactctgaaattcctcagctcaactacactgctaatgccactggctgtacaaaaacctaaaactaagacagtgatgccactgaaaagtggtcaatttcatggccatgcatcaaaaagtgaattaattgtcttatgtccaggcattgctaccttgcaagtgatcccaaggggactgaaacttcccacatgtccagctctccagtgaggggggtgggctacagaaagaccattaagtgttgcctgtaggtcagtgtggcagggagggagctaatgggagatgtgggcagcccacgcagtagtcttggctttgttcctctgctagcctgggccaagacactttcccttttatagcatctataaaatgggagaaaaaaatgacttaataataggaacattttatacacaatgaactgatccatgtgttttaatacacttccttcttatgtatgtgaaaggtttttcagtaaaaagaaaagaatatacaacagtatcttatttacaaatatggaagtataatgtataaagaaaaaaccccctgaaatttagaataatgctattgatgggagttttccatttattcacatcttcagcacatttttattgagtggccattgtgaggttcactctcagcaaggcccatccctcagtcaccagtagtcaaggggtgaaaccagctcacagcttccaggaatcggtgctcactgctagggtgaaatggagcagatagaagcgcatgtggacatcttacttttatcttatatggtttaagtgtttcataataaatatttaaaagaaaccaaagatataactggaaattaattagggaccttaaaggtacttttggaattttgagacagagggtgctgcataattcacattactgttatttttaatgaggctatattcagcacgagatgatctgctttcagatctatatgagactgactgtgaccttggacaagtcacacagcttctcaactcaaaccagccactctacagagatttactgatgcctctacgatgtgcccgaggccttgtgctggaagctaagaacaaaaaatgtgaatccaaagcaattctgtccttgaagggtgatggtaattaaacctgcctcacaaagagttggagcaagcgtaacaacaagtaataggtgtgactgcacacgctacactcttaatgactgttcaaatgaaaggcagtaacagtgctaacagttttcattgacattaataataggtaccccgaaaagtatacaaaagaaatgtctggatacatggaaaaccctttctgtctcttgtaagtgaaagggtcctgcctgataggtagtagttgaacaagttcactgtggctccaacctcagaggcagaaagacaggcccatgttgggattaggttcgcctgcatgagacagaaatctccagataacagtggcttaaccaggagggatgctgatttcccttccacatcagtgaagtctggaggaaggcaggcagtctgtttatggtggctccaaaggggtgttggggccccagacctactcctgctttctgctccatcacctctgtggtgtgtccctcatcctcatggaagagaagacacctagacctccagccatccatctctactctaggcagcaggagaaaagaaggaagagaagagtctggctgttaggtatgaccagcagtctctgtgttgtagaaagactccaaccatgtccttcctccacactgtctccttatcctgtacaccctgtctgcatatctggcacctctgtgcacctggccacttggcctgggggtccacaatagagactccagttttcccaccagttgttatctatcaggcaggaccctttcacttacaagagacagaaagcccagctaaatctgcttcagtaaagtgggattttataggctcctgtaaatgaggagtcctggggcagagcaggcttgatatggggctcagatgatatcaccaggtccaggtttctctctatttacagatctctgcctccaccttgctccatccttgtgagtgcaaatatcaacatctcaagatggctgtagtggcagctctagaccgcacattttcacacatttaagagcaacaggaagaactattttgcccagaagattcaataccattttattggttttgatgggatcaccaaccactgtgcccagggaaatggggtttaatgactagttgaggcctgggtcacaggagggcatcccactgaatctcactaacttggaacagccaagaacctgggccagaaatacagtgaatgggtgagcagggcagccaggaaacaaggaaacagtgctgttgaacatcaagtcctgtcgattccacctttgttaactctctactctggtctgtgctgtcgtcctgcccctggtagattcaggagtactgcaacatcctcccttggtttcccacccaccctacatgctgctaccaagagttctttctgaatgcaaatgtcactttatctctctcctctctaaacccctttagtagttcctgttgcttacagaacaatctagatcagtggttggcaaactatagcccttgggacaaatcaggtttaccacctgtttttgtatagcccatgaaataatggcttctatgttcttaaatggttgaggaaagaaaacaaaagatgaatgatgtttcatgacgtggaattacatggaattcaaatttcagcgtccataaacaaagcttaaccagaaccatcgtgttcatttgtatacaaatggtctgtctggtgctacaacagcaaaactgaatagttacagcagagaccacacagcctgcagagcctaaaatatttgctatctgaccagttcaccgatcctggtctacactctttagctcagtgtatgagatgcttctgtgatccggcacttggatccagctgctccgccctccttgcagatccctgactattccctgtccctgcatacctctgttctggctcgtttgctaaaacaccctcctccatgccctgaagcctgttcttctgcttcctgagctctgctttaggtttcccctaacccctcttcttccccttgcccttcagatgctcaacctgtttgtggccgtcatcatggacaactttgagtacctgactcgggactcctccatcctggggcctcaccacttggacgagtttgtccgcgtctgggcagaatatgaccgagcagcatggtgcgtaggcccctcggccgccccagcggggcccagagcaaaggtctctggagttcccagggaagaggctggaattggagccacccaaatgcctgcctgttacagaaggaaaggagattcctcttgattgtggcccatagaagaggctctggtatcaagccagtcaccaaggacttctgtatcctcctttcccctctctttccttctgtgacagggttttccctttgtgggctggtctcatcatccagtcctcacctcagattatttgggctcagtcccaagagaactttccaataatctttttctgccaatggttagtggactcctttgagttatcagggggtttgacaagggtttttggccagctggacatctggccaccatgatcagtgactgtgttttctctttctcgttcctctcaacagatacagttggatataactctgaaattattttttaaaaaccaaacaagttgttcttccaactgttcccttaaatatttgtggatttttattacatggaactaaattaaatggtaggaattggtgaagataacttctttactgtctcttttgctgtttagtagttctgaagtgatagcgtgccttctaggctctagagcagggattggcaaactacatcccatgggcaaaattcagcccattgtctgtttttgcaaataaagttttattgaaagacagctcaaccattcgtttacgtattgtctctggctgcttacatactacaaggaagaggtgagtgattgtgacagagatggtatggtcctcaaatttgaaagtatttactacagaaatattaggttggagcaaaagtaattgtgggccatttttgcaacaacctatatattttactgtcaaaaaatttactgccagaaacatttgctaatccctgctttggagtataaaggcagcattttggccctcatggctgaggacaaggtgagagttctatgaatgcttactccaaaggaactgttctgttccaggtcattttagcttttgggtcttaactcaccaatcctctatccattctggtccccctctgaaaaatactacaagaaatgttatcctttacaggcatggaccaagttgcttccacctggaacccccttcataatcagagacttttcccaaaaatctatcctctggtgaggctgttgaacttgggtcactgttttacagactagaagggtgaatcagaattctttccttcattaattattaatgacttagggtacagagttatctaaatccattcctattacaatggctgagcaacagctttttctttctggtcttactttctaataaatagatcttagaaagcaatgggcagtgtgttagaggagaaggcagccaggcctgcgtgtcttcagctccatggccttggacaagtcacgtaaccactctgggcttctttacctgtaaaatggtgatcgtgatacctacataacttgcaaggtgtttgtgaggatgatattaaatcatgtgtaactgttattataatcaacaataaccacacgggaatgctaattggaatgtctagaaaatcagcctctgttaccatggatatctatgggattgggagcctaagaagggacctcttcactcacccaagaggagaaaccaactgtgagcaaaaaagtccattgttcatctgggctcactcaggtatccttggcttccagaaaccccagcttcttgtggtttcacttatcttgggatccaaatgctgtgtgtataaaacatgctcctccctacttattccagttgctgggaagaaatgattccatgaggatgaatcatgagactcagacgtgtggactgggaaagagcataaagacaaagaagaatttcttctgtgtgctttgtaattcacagtgtaattcattctagttagttagagtttggttggctttctttataaggtgggtgaggaagactaacaaaagtaatgtgagccagtgtcttcaaaaggggggctgaaaccagttgcaaaaaatgtcagtctatagccactcccaacccacctacttcccaatctcactaaggcaaaatgaaaggacaactggctaaattacctcctctcaagagttgagagacttggaggtactgatgagctgctatctggaagaataggaggaatcaaccctcaaatttcaaaaagcctagaaagagtaaagctgggctgaagcaatagtctccagacagttgcaagcaaggactgaatgcacagaggtggagatgttgtgcttataatttccagcggaaaccctggtctgttccagggtgtatacagacctgcagatccctgggtgttgcttctttttctggacgctgacagagaagatgctgtagccactgaaaattaatcaatcattaattctatcccttccataggaagctggtactctctaatgggctcctgggaaaagggttggtaagatagctagaattctggctggctccagccaagctgctgttggctgagtggcagaaagagggctgcggggagagtgtccatggcttcctccctggctgctctctgaacacagacctcagcaggctcctactgagtaaagaagacttgcccaagctgaacgcagaaaaatctgtcacaaagagaaacaaagccctttgtgatttccctcatgccaactgtgctccttgctaattagcctaatgggaaatttgtctcttccagactgcagaaagccgctgacttcccactgcccctgaaaagtgggtctgagtaactgactgtaatcagtgtctgtgaaaagcaaacagttctgcagtccacttcaaggcagcctgacatctgctctggacagcggtctgagtcatttgtgaattggcaggctttgttcctagaagcctagctagagccagggctgtgtctgcatctggccaggtatggtccagataggtataatggggtgctcttggtcattaggcagttccctttggcattgaccaggctctgatttccttagaaaattgcagcagtgcagtttggcaaggtaatggttctctggtgcttactgttttcagtctctcctggtctggctttgccaggcccaaggaaagaagctgctctgacctctttcagccatcctcttcatggctaagctgtcatttcttttctacccttctctgagtgtcctattaacccacctgtgcttcctttacagcggcaggatcccgtataaggatatgtacaaattagtgcgggtgatctcgcctcctctgggcctgggagagaactgcccctacagggtggcttgcaaggtttgcctcccagtccccagccatgatctgccgtgggatgcaacatctaacccctcctctctgtcctctgctccaccaccactgcgccacatgagggaaccttcatgttgctttcctttgagtttaaagaggtccaaacccttccagaaccagcagctgttacataaagataagggcatactttggggaaaaggcagaagagttaagaacttcatgtgaagaccagtgtgatcgctctcttcacatgcacacactcatgtatgtgtgtatatgcacatgtacacacacacacacacacacacacacacacaggtccaccttagtctgtatagttaatcagagggacctctcctttctctatagaatgcagaaatatttttaacccagcaaaagaattctggcttcttttcactggagatggagaagcctcattttagcaaaagagcctcatcgtcccatatgtaatgtatggagtatgatcctagtgatcccaccctcccagctcctggatggtctggtcagaatgactatgaaagctataggacagaaggggtgagaaacaaggaattagggcaagaggtgagagtaggtaaaagaggcatggatttggtgctgtgtggaagaaggtagtaatagctcagagagtctgggaagatcacagtgaatgaagcactactgagagagtccctaccttagggtcctgccatgggttgctgtgagggatctgagggagctgtcataatttccaagtcacttcttgtcagttacaccaaggatattgttcaggggtgagtaggacctccctgctcaaatctgccatacccagggaattctctatatcccaatggctctactaagcccctatgtgaggccaagcctgctaggtaaggaaccctctcctggtgcaagtggagggaagcatgggctccctggggcatagcactgcccaggcagctggaagatgacctaggctcaggaaggatgccagcctggacaatgggatagagctggcctgggatggtgacacggtgattccatactcaggaggctggacagctgcctctgctgagactctttaaactccaccctggtgaaacccgcagccgcatgtgggagagctggggagggtagcatggcatgcaagatgctcttcctcctcctgtttttgtttcttctgtccccagcatgccattgacctggcacatgctggggaataaagagcagtcttgtccacagagccaggtggaagcaacggggccaactctttgagcagcaagcacagcccaccaccttcagtgcaagacgccgcctcctgctgcacacacacaccagaggggggatacacgacgttctgcctgtgggttcagtggagaacagcctgacttccaggccagcgccccagccggggtcagaaactccaacccatggctggagcaccgtctatccggtttataccactcacacacagccctgggaattgaaaataagctgtgttgtattggggagggatgaagtgaacagggaagtcaggggaatgctaatcgaggagaaaatgagaccccgtgactgttcccatggagagtcatagggactgaaggttgccaccagttttcccgggtctgtgtggggcgtgatataaaccgcaccaggatggagtcatgtctacgatttgccttgattaacaggtttcctattcttttcccgtttgtccattttgttttgtttttcttctcctgttttctgtattttgttcgtttttgctctctgggaatgcctattctcctctcctatctttctgcatccttctccccacttccttctcctttccctgccaccccactgccccgctaacccaccccatcccaactcaccaccctccatgagcagtggccgcatccattacactgagatgtatgaaatgctgactctcatgtcacctccgctaggcctcggcaagagatgtccctccaaagtggcatataaggtagaccaccccttcctttgctctgggctacagaccaacaggaaatgggatctagttgtggggaggccagaacatggggaggaagccaggctggggaggtggaggagggaactaaggaggaaaggcacgatgagactgaagagtcaggaaggttcccaggaggacgaactcatgagacaatacaaggaatggtttttaatactgttcaacatggttttttatgtgatattttgtgtttctacaactgtgtggcttcttgtgagtgagttacctgacaagcagtgttaagtggtgtgtttccttttagaggaggcagagtggtggcctgtgggatggcatatatgggcaagaaggaagcctacagcaaaacagctatcagtgctcatatgcaaagaaatatcttcaatcagataaggaaatcatgcagaaattcctttaaacgtggaattgttaggagaaaggaaaattcctttaaacaagaaatttttaggagagaggaaaactcataacaaatgttttcacccatgacataggaagaatggcataggttccttctaggtgtaagaagaaaagaggaacctgtcttccatcctgtgatagactgaggaatgcagctctattccactagcccagctacccaattctcttggaaatactcaaaaggaagggaaataatgggcacaagttgtattcagcattaaatttgacttactggcataacatagttatggggcctggccccagagttatgggtggattcccctatggcttgctgtttagagattattgtacactgggagtcacttgcccttggggtgctcatagcttttggacatgagttgttttgccacccattagtaatagttactgttagttcccctttgctatttagactgacccagaactctggagctctttcattcacctaggaacacatcatagtaatgtttccacttctctagatgtttaaagaagtgggagagagatggaactcaaatccaaacaagaaactggctttccactctaagacaccatgtggcatcagctttaggcaggatgctgcaatggaacattagagacccttctttgggaagaggtacttccctctctgccaggctggtggttctgccagaggacgttctcctgctgctacctcacattgtatggccccagatagcatctcactggaacatggccattagggaccctcattccccccagtacatggctcctcgtgcacagcttaggggctggcatcctttttgctcacgatggccacatccaaaagtaccaggtggtagaatgtggccttgaatttgtacctctgggatgaagcttggtgggagaaggggagcggggattggaggaaaagttaaagagctccaaaagcaaaatactctctggaaagtggatttggccatttcagtgtgatccctttctttgggtaaggggaacaaggcctgcccactctgctcctgcctgggccacccttcctcgttctgtctcctccgctctccccatcctcctaccccagagcctgtttgcactctcccccttgtccatcctgctccacctcatcctttagacaagttggacttatgcatgttcaatcatgtgcgggcaaatttcatctattaaagactcaaaaagggggcaccaggatacatctttcaagttagataagcaaagcaaaatctcatttctcactgtatttccatatgagtttcagggggtattcatgggacaagtggaaatatggagcagccttgaacaggaaatggagccacctccccgagctgactcctttccttgagccacttcttttagaaatcacttcccatccctaacaaagacattcttaggactccaagggggggccttactgaatgattagggaagccccttccctttggaatttggcatcattcccttggtggagaaaaaacaaacaaactacaacaacaacaacaacaaaacagcagcaaatgagccttaagtgagaagcagggagagaaggactggggcaggggatggggatccttgcccttctttttcgtctgtgcatttgacctctacccttttcttcctttctcactgagatgtctttcaatttttttttttttttgcctgctgtttcttttttctctttcacacagaggttggtcctgatgaacatgccagtagctgaggacatgacggtccacttcacctccacacttatggctctgatccggacagctctggacattaaaattgccaaaggtaagcttaggaagggaggtgggaaggaggaattctggaacaactcatgcaggtggcacaggatggagatatttgaactgtcatctatccagttaaggacacaacaatgcagtcatctgaacatcaagtatctgactcaataactaataattgccctttccttctggtacagtgaatggtttgataatctctagggcttctttcagctttaaaagtatatgatcttcagtgtctggctcacaataggtattctagaaatatttattgaccagaggttaattttgtcctttttttctgtatatggtttattttctctgaagtcttgagaggcttctgtggcagaaggtgctgtcatagaggccatggtagtgttttattcctcttgatttctaatgattgatttaggagagaacaggcttactactacttccaggtggacctttagcctttctgcttttgtgcaatctaaatcctttttaaaatcaggtcactcagactatggagttagggttgctggagggattgatgtatggataagaaggcagaggaacgtacttgcggctattgttattttctcctctgatgtattgagcacctgggaggcttttagaacgaatgaggaagttgctcttagtctgagggcctcagatctcttggcaggatatccctgagtcactgaaaaagggagccaaaatgtgttctgcttcttcagcagaaagacctggtattgcaagatccactgtcactcagtgccaagatttcctcttaaaatatgaggtgccctgctgattcagctcctaccttcacctcctccctcagtcctggttatttctgggtctattctatttattagtaatttatcttattctaggtggtgcagacaggcagcagctagactcagagctacaaaaggagaccctagccatctggcctcacctatcccagaagatgctggatctgcttgtgcccatgcccaaaggtttgggtcttctcctgggtatccttgtcactgtgggcccagcatgtgaagactacgtctttggggggaacccagagtgatcaaagagataaggaaagtttgcccttttcaattaataaggacaaaagggacttaaggataaaacatgttctttaagataggtcactgtggttgtggatgagacttcctgggtgtatagctctctccctccatataatactgctcagcaaaccttcatgggagaaaggatgttgtcacttagctatagagatttagaatggtaggcgtgatgcttactcatgtactgcttatcctcagtatcgtcaccatcactaggtgggcatgcaagccccctgaggacagatcaggggatctatgcactctgcatcctcagatcctggcaccatgggggccctcaatatacattggatgaatgggtgactgatagcacagacctgttccagagagtgggtaacaaagcttagaggttcctcactctctcccattatctactccctgttcaccatcatgccacatttgtgtttctagcctctgacctgactgtgggcaaaatctatgcagcaatgatgatcatggactactataagcagagtaaggtgaagaagcagaggcagcagctggaggaacaggtgaaagtcaatgccagcatgctaagtgggtgggccatgaggagttgcaggagggaataggcctgtgcctccctggggcatagtgcccggcaaggacttagaagcagcagtaatgggtgcggggcccaagaactttctagtgacgtggaattagaaacccagtggatcgaaggttaaaatggtcaaacaagggataagttatgtgcctgtattatccatgttaattttattttccccacagcaaactccgtagtcattggaattctttccttcttcttccctctttttacccagaaaaatgcccccatgttccagcgcatggagccttcatctctgcctcaggagatcattgctaatgccaaagccctgccttacctccagcaggaccccgtttcaggcctgtgagtagcaccaaaacatccctggcatggctgtttgcaatctgtcacccatgctgttgtgcagaccccaaaactcactgctcagaagggcccaagaacaaatactctgagcttgagtgatcctttttctgaagttgaatatcttaaagtgattttcagcaggagtaagagaaaagcagactaagcatacttagcactgtggtcaacgtcggtgatcactttgaatgaacaatagaagaagggagtttgacttcttttaatatacttgggtcttatagaggagattatttttcttcacaacagaactacaactaattcttgattatcgcttccccgtggatctagtgtcctgctggaagatagagcctccctcacaggtgccatgctggctgagtgtaagaggggaataaaaccagcagttactgctttccctgaggttgacacttatagagacactatttgcagaatctcacttgattcccactctagcagcctactataccctggaggtatatattaatatcaccactttacacatgaagaaactggagactaactgaggttaactacgttgcctaaagtcctgggtagtagaatgtggaactggaatttaagttccttatttctgaccccagagtgttttcactataccatgttttctttaatgaacaaaagggaccttattcagaaagggaacttactttttctataataggagtaaaaataaaacacaaattaaggaattttcccatccttctgagtgataagcctttgccccaattaatctactatagcatatgtatctcataacattatatttcgatcatcagcaagcatttagtgcatacctaaagaacacaagtatttctactcaatgtaaatgagcttttgtgattgggtttaacaaagtcccagttcttacaaaaccaggaatcaccaaatcgcttatgttaattactaagagagtgatacttagggcttgggaatgagacttctgtcggagtcatttggaattgctcagatcattgatttctttctgcctgtggggctggactgtttttgaaaagcactgttttcagagatcaaagtccaacatctttggaagagaagaaaaggatgagagtcatgaccaaggtcattttttttttaaataatttgatgttatgaagtacagtgtgtgaattctcctgtccacagaaaacaagtcagtgtttatcttctgcttgtgtaggagggagggagggaaagaagtatgattggaagagtgggacctcttcactggaagggtttacactgttttttgtttgtttgtttttttgagacggagtctcgctctgttgcccaggctggagtgcagtggcacgatctcagctgactgcaaactccgcctcccgggttcatgccattctcctgcctcagcctcccgagtagctgggactacaggcacccgccactatgcccagctaatttttagtagagacggggtttcaccgtgttagccaggatggtctcgatctcctgccctcatgatccgcctgccttggcctcccaaagtgctgggattacaggcttgagttgtttttgttttggcagtccttggcttagaaatgggggataccaccccctaaattgcaatctctgtttatctacaatttgctttacaaattaacccaccaccataggatcactctgtcttttctccatgtatttattgatccatttactcattgatttttaccaatatttattaagagccaatatgtccccagagctgacttaggcactggggctatggcaaagaacacgtccccatggagacaaatctggaagaagaaattacaagagcaatacaggcaaacgatgctgaagggtgggctgttgtgatgtcatggaaacagctcactcagtttgagggtttagagagtccttcctgaggaagtaacatttgagtgagacttgaagacaagctcttcaagagtggtaagagaaagtatggtaagtttaaggaacctaaaaactgtcatgatggttggagcatggagagctcaggggatgtgttaagttatggatttggagagatacacaggggctagtactttgggggcattataagcaggataaagaaattggattttgtctttggataatggggttttatgcatcagaatcatgtgatcagatgtgtgctttcttgaattcagtgtaggctaaatggattggagggaagcatttctagaggcaggaacaccatttcgtaggttactgcagttgtgtaaattatcagtgatagtagcttggactagcaggatagagatggagacagatggtcagatgtgagaaatttggtagataagactggataggatttggtgattgatttgctacttggactaaaggggaaggaggaagcaaaggattctgggtgaagcctttgggtgcatgttggtacatttcctgacattgggacactggtggaacagcaggctggttcctcagaaccatctgtgtttctagagccatgcattgttcagtagaggttgatctaggggtatagtggtagacataacagatagggtcgctccctcaaatatggtggaaaaccagacattaaacagaggattattggaaagaagaaaagttgcattttcagtgatttacttacagttctgataagtgctagaaagagtttacagagtggtaggggagttggagagaagtgttctgcactcttagagtggcctctactaaaatctcgaggcagaaacaagcctagcctatccaatgaactaaaaaaggccgccatgtctggagttcagggagcaaaggggaaagtggtacaagaggaggctagtgacgtagggaccagatcatgagggaggctgtgttcagaattctggactttatgccccggcttgacaaggttttcaaagtaggagatcactctgggttccagttatttaactctgtgagattattaagtgattccaagggtcctctccctctagtgaggattctataattatttactctctgtaggacaaaaaggaacccatttctttctttctgagacatgatctcattctgttgcccaggctggagtacagtggcacaactggctcactttagcctcgactttctaggctcaagtgaacctcctgcctcagcctcctgtgcagctgggaccaccccaggcacgtgctatcactgctggctaatttttttgtagagacaggtcttgctttgttgcccaggttggtctcagattcctgagctcaagctatcttcccggttcggccttccaaagtgccgagagtacaggtgtgaaacacagtgcaaagccgagaactcactcattcttatactagctgtgctcaatcttgttcccagtggttctcaggagatgccacaagtggggaagatgactgacatttaggcaggtcatttaaatactgtaaaaactctgtagcagctgtgaaaactcagcaaaagctctcattggaagcaaggggacagattaggtgattctctgctcttcatatcttctcctgtaatctaaaaaaacattcctatggattgtttttaagtaattggcaatccttgctcatgccttgagttttccattggatgcagagtcatcagcagtagacttaaaagagatggtgtcccatctctccctcctaactccgccaccaagagagctgctgcccagccactgaccccagtccttcctcccataatctggaagctcactctgcattcttgagcaggtcagatggtagctattaccatactggtggcagtcagccaataatttggcaacaggcacctcattctccagaaagcttggctgcttctttctctcctaacaagcccagtggatcccgtcaggttaagagtatctggaagtactagacagtggtttaataacaagcctactgtgccagttctgcattcttttcccttggaggcctctaaacaactgggcagactttgtctccatcctcttttctcaccaccatttaaacctcttcctacattgccatcaaccaagaggttttcaactcctcaccaccacctctgaaatccttctcagttcatgaaccaacagacttaatgtatggtacaaagtagtccttcaataaatggcaatggaattggacttaattgtttagtttggccagggatgttggcgaaataagaccatattcttactgcgagtagggaaaatttttaaaaagtccatggctgcttaatatttaaacaaactgttcactgtgtaaactagggtgtttttccgccaaatggggaaactgagcagaaataggtttacaatctagtgttgctcttccatatggctgaatgtgacaaatgatgtcatttgtcatagacatgctagcccccggcagaataatgaatggtttcaaaggcaggatgcaggttgaaaacatcagtttctgtctcttctagtgcttttttttttttttttttaatttcaggactagccacatgtaagttactaggtttacaaaagccagccaaggctaaagggtgttgccctgctggggtgggaattgctagtggcatgactgtccctcattacctctggatttgacattgcttttcaggagtggccggagtggatacccttcgatgagtccactctctccccaggatatattccagttggcttgtatggaccccgccgatgacggacagttccaagaacggcagtctctggtgaatgcatgagttatatgacctcaaaactacttccttggtttcctgatccctctcactaattttattacatagtcatggtccgtcaggaaaatccattctagtagtttagccagttgccctggaggtgtcctgccttagcccttttctagcccagtttctcatgtgctctgacaatgttccctcttcaggttttacagtcccagaggtcccttccctgcagcaggaacttaaattgctttaggccaagccctcttagtttatgcccgaatatcaagtgtaagaccggaagtcacttataaaatcttgcctttgatggggagcttgaagatgcatcaccagagaatgagtgacaccaaccctgcctcttagtgtagttaggtactgcttgtgggacacacaaatgccccatgccattccttagtgatgcccacctcctctagaacctagcagcagcatgtgccacagtgatgagctgcctgccaggaggcacagaagactgtcttacctctgctctgtgtgggttcaggcacattgtcccttttggtcacaattcaaagacattctaacaggccactaaagtcacttccctgaccccaaaatgagtttattagcataaatggtgaaattcctggctgggtgcggtggctcacgcctgtaatcccagtactttgggaggccaaggcgggcagatcatgaggtcaggagatcgagaccatcctgggtaacacggtgaaaccccgtctctactaaaaatacaaaaaaaattatccaggcttggtggcaggcacctgtggttccagctactcaggaggctgaggcaggagaatggcatgaacctgggaggcggagcttgcaatgagccgagatggcgctgctgcactccagcctgggtgacagagcaagactccgtctcaaaaacaaacaaaaaagcaattcctgagagacctattgagtcaagtgaaagcctgaagaagagaggagagattcaagttttggcttagctaatacaaagctaaaatatggttcctaaacatcattgactttaccattattcctagttcaggagccatgagctcaaggtcccccaccccgaccttagcttagaattgaagcccaagcagtcactggactgaagagaaaaaaagacaaaacccaaccattgcaaaagtctgtacagacagcttgtactaagtgagttccatatcatttaaattctgattcatctgtggctcttctctccccttcatttctctcctgatccctccccgctgctactgtgtacctcagagccaccctgaatgatgtgtgatggaatgggcacccccacagagggcgaaaaacactcagtagctcaaacaaatgcgtgcttctatctcctgcgagtgctgagacagagaatcgtgcatggttgtgtgggggagacagttagtccagacgcccccagggctgagcaattgactgcctgagggtgttcttgatgaggcaggtaggaactagtagagtcattctctgccctcccctctgaggaacttagcaccaagacctgtggaataataaactatagatagtttgattcttaaaaagacctcgcagcattttgcctgcctggcgatgtgtctagtgggaaaaaaatctcaataatgtgtcctttctttcacagggagactttatgacatcatttctgcgggttccccagggctgagccgtagtgccaggactttttggatatgtgttcatctcattgtcagtaccagtgtctgtaattcaatttaggtgtcagcctgtgctacacactcaacactgtgtacttctgcccatccctcggggctgctgctccatgtccccaggcgtggccatgattgtgtgtgtgcatatggagtgtgtgtctcacaccacctctgatacctgtagactgcagtgttgttaccacgtctgtctggagtcagaactgtgtgctatacaaagcatgtactacaaacaaacactataactccctcaagtgcaccatagcacatgtcttgggaaagtacccctgccatacacaccagaaaccgctcagccaaatggtcacataggctaaggtgggggtcccagacactctttcctttgggcaatgccctacctgtttttagggtgtcatttcctaaatataaaatagctttttctggtacgatctccatctgcccaagatgttcttaggtctttttgttaggtagcccacgtaaacatctctcatacagctctttatgcaatgatactagctatctgtatagcgcatgcacagctgccaaacaagaatgacagaaccttagagatttccagtccaacctgataacactgtaggctggcacagtccaaaacaatagctcttagccacatgtggctagtccaaataaaatataaactatctaatttttatattgattacatgttgacatgctactatttggatatattcagctaaattaaatgttattaaatttcaccttttacaacatggttaacaacatggttacttggacatttaaaattctgcaagtggcttgcatcatccttccatgggactgtgtcactcagggcatccctgacagccacccaccacatctttggatggtttcaatcagaagaaaactcttaacgtcacgtgtcttaaggcttgagaagacgtatttgacatcagaaattgttgacttcccttagaaaactggtttctatttaattgataaaaggcttcttcagattaaaagaataaatccaatgctatcacttcttagaaagcgaacttcacatatctgaaaagtattataccaaacagtgtttgttgcagaaaacaataaaatctgaatcattgcttagtgatgaaaaagaggaatctacaccagaaaaataggtgaccttcagcactcaatcccagctagagcttcctgtccggaacatatagcacataggtgcacataaacacacacacacatatacatacaactgagaccttaaagctgcaagtctctcttttgaaagccattcttgaggaggctgaattgtccactggacgtgagaagcaatgagatggaaccaagtcccacaagcttggctgtgtgtttatttccaggagccagaggttagtgaattaaaaagcgtgcagccctctaaccatggcatctaccttccttcggacacccaggagcatgcgggatctgggagggcatcttctatgccacgtctgactgtggatccccaggtaaaaagcaaccacctacattaatgcagtggcatccgggctgtattagctgggttatggaataatatctgatatttgcaggtgagccgttgacttgcccgcaccccttccctataaataaaacctggctcatgggtcgtctctaatagagcctgcttctccggtgttttcaatgaccccccctaaccacaacagcccagcgaacaaaattgcatacttcactccggacgggttaaacattctcaagattcaaccagccatgcaagaaatattttccaggattttctctgtgtacttctccatcctttttttgtttcctgactcctccagcacatatgcagttacttacacacacaggtctgtgtcaggactgtctgtcctaaccagtgcaggccacatctcatttctttgtctgttttcctggcttctttttcctgtctgtcggtcttacatcaggttttgacagagacaagaagtttttgtagatttgttttaatatctgtggcaaatcaaaatgccagaatttaaaacggggctaggtgggattgatggcagcagagggagagtgatacattcttagcacttgttaaattgcaagctctcctaggctctagtgctgcagggcagggccttctctggcaagggcgtttaaaaaaaaaaaagcaaagccatgcttctttcatgaatggggtggcctcttagacaattgccctcacatgtttcaaagcagcacagtatttgctgcagcctggctgcgccccatggtagagggctctatgggagcttgcacagttcctgcctgcattccgcatggctttgccttggtacactcagctacagaagaaaagatcctggaccatttccagtgactatattaacataatgtaaggatgctttcttgaacagtttccaccagctaaggtttgagcaagagagattcaagggaagttaccatttccaggggttacaatttgccttccttaacgtctcagtcttgctgcttctgtccttttagatcttttcaatcgttaatccataccttgtgtttctctgggggcttgtatttccaggtggtgacagaccctagctccatgagacgttcattttccactattcgggataagcgttcaaattcctcgtggttggaggaattctccatggagcgaagcagtgaaaatacctacaagtcccgtcgccggagttaccactcctccttgcggctgtcagcccaccgcctgaactctgattcaggtgaggaggtcttcagtgtccagctctttcatcaggcagtgggctcctgccctgatgcacttactctccaaggactgtagataaccagaaaagaattcagagacaagggctgaagaaagtgaaggatgctccttaccaaagggaattcctgtatctgacttacatcctgaaacaggccaaagccctcctctgtgttcaccggaaaagctgttgcaatcccttccttctggagcagggctatacaaatcattagaattgagggagcttttcaaatagccttctacaaaaccactggggctttttaggattgtattagagacccactgtaaggactgaactttaaccaccagttccacttcaacctaaacagtgctacctggagttatttcctgtgtttgaatttttttttttttgagacagagtttcactctgcagcacaggctagagtgcagtggtgtgatctcggctcactgcaagctctgcctcccgggttcacaccattctcctgcctcagcctcctgaatagctgggactacaggcgcccgccaccgtgcccggctaattttttgtatttttagtagagacggggtttcaccatgttagccaggatggtctcaatctcctgacctcatgatccgcccgtgtaggcctcccaaagtgctgggattacaggcgtgagccgctgcacctggcctgaatttcttttaagctttttgctttaaatatatatatatatatatatatatatatatatatatatatatatatatatatatatatatatattagtctggctcaactattttgttttattggataaaggaatcaaagttgaaaaagcagtgacttgtcccatgtcatagggccattaagtggcagaactgggactagcactgggatcctttcatttcaatcctggacttctcaccatagcattatgttaggtgtgttattatttagttcatagaaatttcttaattcccttctgctggtgccaccttccccccaaaaagttatgcagccatatttatgatagagttcctgagccatattgttaaccaagatcctatattgtgtgtagcataaatagaaacagaatagattgcattgtttgacatatgtgtctctagtggcaccttgcaaacttacctgcttacaaaataggtaatttgctagcctgcctttctcccctgcttccctttcagatcatcttttgacatacctggagaagccaggattcttttaggggcctatcttttttcaggctgctacaacaaattaccacagactgggtagattcaataacatgtatttgtcatggttctgtaggctgggaaatccaagaccaaggtaccagcagatccctgtcttctttctattctcacatgatggagagcagagagacaggaagcaagcactctcaggcctcttcttatcagggcactaatctcatcatggaggccccaccctcatgccctgcctcctaataccataccatcaggaacaaattaggcctcaacatttgaatttggggggggacacaaacatgtggttcctctgagggcccaaccccaggctgtgatgtgatacttggagagaagtcccttcatcatcattggtcagagtggacagagttataaccaagtgcttttgtcacctctcacaggccacaagtctgacactcaccgctcagggggcagggagcggggacgatcaaaagagcgaaagcatcttctctctcctgatgtctcccgctgcaattcagaagagcgagggacccaggctgactgggagtccccagagcgccgtcaatccaggtcacccagtgagggcaggtcacagacgcccaacagacaggtgagcgcagagaggaagccagtctacagcagaaggacaggggagggtgggctgtatcattagatgcaagtcgtgagcatttcgcaaacgcattcaagtacccacaaagactggaatttcacaggaagctatacctatagtgcatagaggttagctgctcaatgcttgtgtactcagagatgatctgaattcacagaaaaccagatttcccccaaaaagatggtgtctagaggtcattccattccagccttcagaaaccagagatataaataggttgacagccagattttggaggagaggatggtcctttagccagaaagtttcctttggccatcttgtgatcctcagtatttgtgagaattgtgattcatctctcagcccaggattcacaagtcagagcagttcaccctcatttacctagcttgcagccgtcccagcaagatcatgccttttgctgaaccaccagcttggtgcctaaggaataactatcagatctgtatgaaaacattcatagactctgttttactccttactacagccctatctctagtcatggcattttgacccataataggagaccccctcaacagaaacgatcagcggagaaaaggcagggctgctaatgcaaacctttagagacacagcagtcgagaggtttcccttctagaacaacagttttcaaattttagtgcagaacagcattaacccatgaggtttactagcactgcacattcctggtgcctgaaggacccaggagtctgcctttgaaaagacccctctgtaggattctcagcaggaggttcgtaggtcacacataccttaagaaatgctctcctggaggtttacttcccaaaacctgggctcagtttcccttgggaataggtgagggcaagtatggcctgagccaacaactgagtgtatcaggtacagaagctgagttcagcaaaccacagaagacatgggcaggaataagggtttcccagccagagcaactccagcatttgttcaccttccacagagttgtctttctcaagtttaaagtctctcttttagtgtgccccttgttacatatgtagagcttccttagtagtccaagtgcttgttccacagacctgccacccctagcatcacctggaagcttgttagaaatgcaaaatctcagtccttgccccagatcttctgagcctgcatctgcagtttaaccagatccccagaggtttgtatgcacaaagtctgagatgtcctggtctaaatgttcttgactccttaatctcttcaatccctttttccctgagtggatgtgaatactacagggagctccagctcaggcctctccctgacagaattcagattccaaggactctcttaacagagttgcaagtagggatcatgccaagcccaatctaacatgccatgtctctcctgctatacagggcacaggttccctaagtgagagctccatcccctctgtctctgacaccagcaccccaagaagaagtcgtcggcagctcccacccgtcccgccaaagccccggcccctcctttcctacagctccctgattcgacacgcgggcagcatctctccacctgctgatggaagcgaggagggctccccgctgacctcccaagctctggagagcaacaatgcttgcctgaccgagtcttccaactctccgcacccccagcagagccaacatgcctccccacagcgctacatctccgagccctacttggccctgcacgaagactcccacgcctcagactgtggtgaggaggagacgctcactttcgaagcagccgtggctactagcctgggccgttccaacaccatcggctcagccccacccctgcggcatagctggcagatgcccaacgggcactatcggcggcggaggcgcggggggcctgggccaggcatgatgtgtggggctgtcaacaacctgctaagtgacacggaagaagatgacaaatgctagaggctgctcccccctccgatgcatgctcttctctcacatggagaaaaccaagacagaattgggaagccagtgcggcccgggggggaggaagagggaaaaggaagatggaaggacaccatgcattatcagagaagaggaagtaaaggacaatcagaacaccagtcaaacccaccaaattgctttattcccctttgcaagatgggcactgccatagttctgcctctttgctggggaaagaaaccaggaacgtggagggttattactgcgggagaagggacacgaggatggctttgcttccccttgccccttcccacttttctaaaagctgtggagggatctagctggcctatgtctacactcagtgccctgagaagcctggaagactttctggctcttaactggggagtagtggagaccataggagaggactctcctccctcaccagctcttacgcctcagccagcaccactgccaccagggcaactgcagcagcatctcatgcataaccctgtggcttgcttcccccagggcagcacaggctaagtcaggaacatcggatgccagggagggaggagaaagccgaagcgaaaggggtcagggtgctgaggcaacagcagcaagggctggtctggacaagaaaagccatagcccggcagcccctaccatgagggagacagagaaacagaactggtggtgctggggggtatagccccccatccttgaggcctgtcacccacacagtaggtgctgagagttaggacaggtcaggaagtcccccagggtccacaaaggtgcctgaggctctggtaagggtgaagataaaagtatttaacaaccgctatggcatcaatgtaagtggagtttggtcctagtgccggagcccatgctattccaggcattggctctttagatgccagtcatgggggaaccctgagggtgtgggtagagtagcaggggccacctaagagattaaaaacagagtctgttttccaaccagtgtggaagcaattaaatatacgtaacagtgctacggccacaccagcacctcctggctgaaggtcagcccacactctggtccatgaggcagcaaggccagtgctgtgccaagcccggtaaggccaagtgccgaggcccagccttccctgccactcctctgagagggcagaacacacatatccaagtaggctacccaccactgggtagggatttctgtaaagatgggaaaggctgatagattgaaataagcttctgtgaaagtctggatttactgaggacctcccctgaggagggaccgttgggaccgcagattctgcagctggtgtggggttcaggtcagtttgtcaggatgctttaaggtgattagtaaatatacctcagcttagacttgggctgctccttctagcaaagcaggctccagtggggcctcatcatacaggatgacaagactggggccctgttcaccttgaacatgcccctgggccaagatggggcttcacccctccccagagtaagagctggggctgacagtcccaccctgtcattcctaatagcccaaacgcagaagcactgagcaagagagccctttcttgccaagccagtgctcttttggtatatggcatacagctccattggaggggacacatcactggctttatctggtggaaatgtacctttcccttaagttcctccttagtgccatcacagcaggtgaatgggtgccctacggggccctccttcccccaccaggaacagatggaacctgccacccaggatcctgatctgccctgcactgagcactcagtggataaacactcctccagcccagacacactcctcctcttgggcaggagcaatccagagttgttatttttcttagaaggagcctcttttccctctattttttaaattgaaatataatagctgcatcagccctgaaaagccaaattcaaccacatggctggagaatcatttgtcatggccccgccttctcttctgatactaatggagcttcatgacccacggtcagcccccaaaccaaagttgtcccaacagaggaggccagtgaggcagagacagagctctcccactctcagaccctcttttgtcttcattttcctctcccacttagcacatgtgtgcttgagggtggctgggaatgtgatatacagcaccctgatcctaacaggtgtgattgttacgtaagacgctgatactgggccttgtattgcttttaaagtttcctctgctcagcatcatttcatgccaaagtgctgctatgggctgctttgtgtgcacaaaattgctttttccacctcggaaatgcagctttccctagggggaggcctacaacaggacgaccattctgagccagtgagtctattgcatggtgttttgagaaagggaattttagtgacaccttatgccatttcaagaggagaaatgcaggctggcagagcaatttccagaaatggaatttgcctgcaaatagtataaacaacactaaatttactgtgccaggaaatcttcctgaactccttgaactcatacacacaggtatttgagtcctgaataaagtgttggaaagcactgcagatgcggtcacctgactgaccacctgggttttctattaccagtgaatttcttttattcaccttcccttgaccaagaaattgggtttcttttccctcagcctgcacttactcttctattaagaccagaaaataaaataattttccgttgagtcacaaactcatcatcttgtttggtgttctgctgcctctgaacaaaagtgaatgccagccttcccttgctgggtgtcagagtctgcctcccttgaaaagaggcccctgtagaccccaacacctattcttttctctggttaattacagcagcatctgagaaattccatgcaaaagaagactacaaccagtgtttcagatataccacaagatcaaatttgggcactggtggtccacctcagaagactcttgagtcatatattcagtttctcttgctaatatatgactcgtcttcaccatctcctcaaaacaagagcaaagccaagatagaggaaggtaaaaggaggaggaaaggaaaccaaggcagggagatgttctaagtaggtttgcatttagttacccctcatttcacttaaggctccagacagactccaggtagggaatgcatgctgtctctttctctgtgtctgtctccccatctcctagaggacagagtgccagcgacctctggacaggggcagggctccagccaaggtgcccctgagccagggtcaacatagaatttcctgccccgtgaagggctggcaccagctagcatccccttggctccacatgagtcatgaacacaattgtcagtgggggtctctgctgctcttctggctgaagaatctgtttttcttctgggcttcacttgtagttcctattcaatgtctccatagggcactgagatcaccaagaacattacccagaagctgaagtccaaatgttctagattttgacctctcttgactctggggccacaaagagaaggccccataatccacctctcagccagtatctcccttctttgcacagattcctcccaaccccatagagcctatgtggtgagcatgagggtcgtcttccctctgttctcccatcccagcctctgttttgctgcatgttagcgctgatccagctcctgagatggttaattccacccaatccaagcttatttgcttgcctgactgactccaccactctctcagctatgggggaatattgcattctaatgaaatagggtttggaactcacctggtgctcctcgcaagacaactgacacaaggtgtagggtgtgggggtggacaaaatgcccacctactggataaaagctcactgcaggaaaatgaggtctcctggcataatgcaacaaaaatctcatataattttgatttttaaaaagttgttctcaatttttcattacatcctacttctcagccctctggatgtttcatttttttggacaaagtgtttctttagtggttggggccagggacaggttgagggatatttctcggctcatttataagatataaatattatgaggttgtatgtaaagaaagggcaaacgtacagcagaaggggagcaaatagctacctttcaaggattttgagatttgaaggttaaggaatttttactgctatttttgttcatcagtttcatgtctgttatgttttgagatcctcagaggcctagggttagcgtataccaagaatcctggtgagaggcgttgccatgccttggggtgaattcttccccactagctctctcacccagcctacaagtccttctctcatagatcccagagcaatgggcaccgtccaggaggtacaggagaggactttatgatgcaggaaagaaggaagaagtgggtcccttgcaagtggccagacagggaatgatggtttgactccagaaatcaggaatcaggttcaggtttggataacttctctttaaaatatctccacattgagactcttattttaacaaaatccaaacaaaattaactcagggcttgtgacctaacctttgtaagaaggtgatcaaagagatcctacattaataagcactgcctgtagcaccagctttgtctttttgtcttttgttgtttctttcctgaaccaccctgtacatcatagccaggtctaccccaaatagagcagcagctgatggcttctctgctgtctgtggagggagggctcggctgcagacctatggtgttttgtcagctgttaggtgctacagcccacccagtcagagtacatagacatagcgctttaagggacaaaggacaaacagaactatctttgctttccggaggccatctttttctttccttgaatcctttctgctttaaacttctgaggtttatgcatcccagagaggtcacaccaagccaaagagaaaaaattcatagattgtcccagcctacccaaagggcctgaaaagcctctctaaacaaaactcaagatagctgagaagtatgaatggggttcacagcaaagtccaattgatggcttttgaggctgggacacccccaaactgcccttctgtttttgtagttttgctttcttccacccaccctctctccgcatgctgtaagttaggggagttagtatcttgaacttctaaatgcaaaaggagattttataataagccatgctacctgtaaatacattattgaggtttgcatttttatttttggaggtatgaaagagttgagtagaccaagtcaaaagaggtgtggggatttatgtttatttttatttgtttggggttgtttggttggtggctgggtttcttgtaacagacctattctggaatagcaaagaaggataccttggtgatctgcaatgtttctgaatctgtttctctttaggaagtgattgccatcaaatttagtgatatgatatttgagtcaaaaatctgaggttatagtaccagctgtcttttctctctggtctcctttttgtcgtctttctctttctgtctaaattggcctctgtcttttcctaaggacttaaaatataacccaaattaatgaagaactgccccaaaacttcagtgaaagccaaggaggtacagaattttttcaggacatctttaaccaatacaaaatttatgtcttaagaagataatttttacaatagtgtagtaatctgataaatgaaaactattggaagtcaatagttttttatattccagctttctgtattcaaacttgtgccttcagcaagcatctcttcactttctttcccttgtcaattgaaacatgaatgtttggctaactcatgatgtaaagtgtctgttaagttaataatacataatttaaagcacttagtctccacaaagcaatttagaaaaatcttcacttgttagatcccatgaagtacctatgaaattctcagcattgctataagcatttgattttttttaaggaaacttcctgtttaatggaatctgaatccaagatttgctttaatttcactctattcttcccattttcccttattcttcttgttgtctctctaattaaaaaaaaaaaaaacctaggcttttttttttctatccagaaagttgggttttcatgatctgagcttccttatgtctccttctctttgtgcaaacttaaaccagtcatagattgtcacccagacatattctccaacccagcattggaaatctgaacgaatcttttctctttttgtcctacaagtttgtcagagatgagaatggattgctgtgtacattctacaaccagaccctagactttataccaggctgtgccacttcctcttcacttcactcagaggatggccccaaaactgaaaaggaaatgaaatcatcaaatataccaaatccgaatttgactttatttgatgactcaatattttccttccagtactctaatttttttttatggcaatggcctatatggcacaagaaccaccacttaaagcaaatctgttgaacatttttataagggatgagcaagaaaaacacactccaaaattttaaagtgccattaatcaatttttaagaataaaggtaatatgaaatgagggctaaacaatgtaatataactgccagttaaggtagacagtagttgtggtcttagttacatttgatatggagttgtgtaatattaagcagatcccagtggagttagtaaaaacataggtattgagttttaatggctaccaattgggatatatacttagcctgcaggctgaactttagtcagtgtttttctatcatgttgttttgtgaacaagtcaaaatttatacaaagctaccctaagtgctgcaattgcagaggaacttgcctcttcgtgatattagagggcagtccaactccgctcaaactgagtccaagatttgaattcatccagaaaaacaaatggaggagaaaagcctaatgcaccacatgtgtttggcatttcatggctgggacaatggagtagagggtaggaagacaagctgtagaacaaaagcaaagtgaggtagaaagtaacaggtcccagaagaggacagacttagagatgtgtaaccttggatcctctttttcacttagaatatgggtaaacttcttagcacaagactggattaagagaagttctttctgttaaactcacctagggtagtggctttgaaggcctcagaggattaatagattcccaaaattttcttccagacctgggagatggagagaaagaggttcttgctttaaagcggctcgaagacaatctttatgacttcagcaactcttcaacatagtagcaccaataaaggagagattatgttaacttcctagtggtgagaataccatgggatgggagaagggccagtgagtgggatgggaatgagcttcatcaggaacagatttcagactctgcagggtgcaccggttctagcctcaaataacaacattgcaaggaggtggactacagggtccacaccctctgtccttcggggcccatggtcaggccattccctctttgttttgctcctagaggatgagcatgtaagatgagatcaggagggaaattgggtgctctgcctcaggctgttaaaatgctgctacctgcattctaaaacgtgcaagtcatgccccacaagacacctccttagggcagcatccactgtggtgtgccagcctgacacccctgcagtcacggtgtttgaatggcagctgatgctggcccacccagagtatcggtgcatctctcctaaagccacagttcagcactgcatgttgaccaggcggatatcctataatatagatgctcgtttggatccaaaaggaaaaccattaaaaataaaagaaagatgaaaaactttaatgttttgggggggataaaagaaaagaataaataaaaccttgttgtaaagaatgcatcggcctgatttccctcacttgatgtgtttctttgctgctaccagaaagggaaatcatgggagtgaagcctgccaggaccctcagggtaagctggcagcaggctctgcagctgcacttagttggggtctgctcagaccagtcaggaggaattcaggaggctttcaaagtcccaaggacatcctggctctgaaaggttttcttttgttaaaaaatgcactttgtgctgtgtgtggtagctcgtatgtgttaccccagctattcaggaagctagggcagaaggattgcttgaggctaggaattcaagactggcctggatgacagagtgaaaccctcatctcttaaaaaaaaaaaaaaggaataaaaatgttctctgccttggataacatttttttttaaagattccatacaaactcattccctgaaagagaaaaacagattttctaatcaggacattgtcctgatctgcaagcgaggagtttaacaaggtaggcagagaacttccttatggaacaacagggctctgtgaccagaaaaactatgaccagcctcctctgaaaaaaggtggggggattatagggcaccagctcagccgccaagttcaggaagcagctgattcccaagactcttaggagatactgtccattcttcctcctgtccacatcactccccatttaactgcaattgctcccttgccacagggaaagcagcaagccccaggcccaggcctccatttgatttgccactccgagaactgtctgcttcattctgcttgaggagatatcttcacctaatcctagtgttaattattttaatctgagcaacgcttttatcaattagatagaaaccagcattccaaaataagtcccctaagtttgtagtttgagccaagatattttcttgagccctaagatatatgactttattagctaggatttttcttatgattaaaaacatccaaaaatgtgatatgtggtcatctctcagggaggtctaggtccttgcaggctggattttagaaatttctaagattctctacaacttttaaattttatgttatttttcaatcataatttctttcctgtggcttctatcaccattggagttagaatctgacaacctttaacttcacacttttatgagataataagttggtttcttgggcaaaggttggtttgtaagccatttacatggattgatgatttctgttcttgttttcttctaacctagaactcaggtccacagttttccacaggctaatggcactatgaaacagatataaagaaaaatagacactgttctgagtttctcttgagtgtttttgtgctatgatctgatcatctattggttacctttacacattacattcctaaatcttctatcctgcctctgggatattagaaacttgtctttacttgtgtatcacattactttgctaatgagctgggaaaattcccaaactaaagacccggatttcagtttttaaaatatttaatcacaaaatattgggactagtcacaggcacacatagcccgggaactccttaaacacctgcaacaaaaagaaaagaatagaggctacaaatgcaagcgctggaatagaaccaactgaggtccaacctgtgcaccaccagttacatgctgtgaggccctgcgttggccacttaacctaaaactcactttcttcacctttaaaatgggaacaataatagcaacaaccccgtagggtggttaggcagagtgaccaaattattgtgtatgaagagaatagcccgtgtctgtccacaataggcatctgataaatgtcaggtctcaccatcgttgtcatcattagcaccacatacaagtgcattccccaaacccaccacatctgagaaactgaatctttcagggccacatgctgagaatacactggtgggtgctccccttctgttaatgaaacacagaggacgagttgatccttaggcaagtttctaaggaaagggggatacatttaaaaagcaaaccattactatgtagctattttaaaataatgctgccactcttgcatcagaaacaagtcataattttgtttattcttcatttctcatttccatattcgtttaataacaaaatgggagaaacattagtgggagatagtaattgtaaaagtagcaat

SEQ ID NO: 1178 - DNA, 7291 bp, Homo sapiens
gatgcgtggactgagcccagaccgcaggctgcccgagcccgccccctgcccggctgcggggagccctgagcccaggtccgcgggccgccgccaacgccacgtcctggccctgccggaagaagaggcatggcggccccagcagtgcgctctgctcgaggccgacgcctcggacgaggtgggcatgctgccggcttccccgcgcgccgcctctggcttcgacaacttcttccaggtgcaggagggcgagggccagggctgggagggcgccatggcactggaggcgggctccagccctttcctgccggtgagccccgaggtcatgaagcggcggcgcgggggcctcatcgagcagcgcgacatcatcaaggcccacgaggcgcacaagatgcagagcaccccgcaggcccggcgcaaggaatgggagatggctcgcttcggggaggcggtggtcgccaggccagggtccggcgatggagactcggaccagagcaggaaccggcaaggaacccccgtgccggcctcggggcaggcggccgcctacaagcagacgaaagcacagagggcgcggactatggctttgtacaaccccattcccgtccggcagaactgtttcaccgtcaacagatccctgttcatcttcggagaagataacattgtcaggaaatatgccaagaagctcatcgattggccgccatttgagtacatgatcctggccaccatcattgccaactgcatcgtcctggccctggagcagcatcttcctgaggatgacaagacccccatgtcccgaagactggagaagacagaaccttatttcattgggatcttttgctttgaagctgggatcaaaattgtggccctggggttcatcttccataagggctcttacctccgcaatggctggaatgtcatggacttcatcgtggtcctcagtggcatcctggccactgcaggaacccacttcaatactcacgtggacctgaggaccctccgggctgtgcgtgtcctgcggcctttgaagctcgtgtcagggatacctagcctgcagattgtgttgaagtccatcatgaaggccatggtacctcttctgcagattggccttctgctcttctttgccatcctgatgtttgctatcattggtttggagttctacagtggcaagttacatcgagcatgcttcatgaacaattcaggtattctagaaggatttgacccccctcacccatgtggtgtgcagggctgcccagctggttatgaatgcaaggactggatcggccccaatgatgggatcacccagtttgataacatcctttttgctgtgctgactgtcttccagtgcatcaccatggaagggtggaccactgtgctgtacaataccaatgatgccttaggagccacctggaattggctgtacttcatccccctcatcatcattggatccttctttgttctcaacctagtcctgggagtgctttccggggaatttgccaaagagagagagagagtggagaaccgaagggctttcatgaagctgcggcgccagcagcagattgagcgtgagctgaatggctaccgtgcctggatagacaaagcagaggaagtcatgctcgctgaagaaaataaaaatgctggaacatccgccttagaagtgcttcgaagggcaaccatcaagaggagccggacagaggccatgactcgagactccagtgatgagcactgtgttgatatctcctctgtgggcacacctctggcccgagccagtatcaaaagtgcaaaggtagacggggtctcttatttccggcacaaggaaaggcttctgcgcatctccattcgccacatggttaaatcccaggtgttttactggattgtgctgagccttgtggcactcaacactgcctgtgtggccattgtccatcacaaccagccccagtggctcacccacctcctctactatgcagaatttctgtttctgggactcttcctcttggagatgtccctgaagatgtatggcatggggcctcgcctttattttcactcttcattcaactgctttgattttggggtcacagtgggcagtatctttgaagtggtctgggcaatcttcagacctggtacgtcttttggaatcagtgtcttgcgagccctccggcttctaagaatatttaaaataaccaagtattgggcttccctacggaatttggtggtctccttgatgagctcaatgaagtctatcatcagtttgcttttcctcctcttcctcttcatcgttgtctttgctctcctaggaatgcagttatttggaggcaggtttaactttaatgatgggactccttcggcaaattttgataccttccctgcagccatcatgactgtgttccagatcctgacgggtgaggactggaatgaggtgatgtacaatgggatccgctcccagggtggggtcagctcaggcatgtggtctgccatctacttcattgtgctcaccttgtttggcaactacacgctactgaatgtgttcttggctatcgctgtggataatctcgccaacgcccaggaactgaccaaggatgaacaggaggaagaagaggccttcaaccagaaacatgcactgcagaaggccaaggaggtcagcccgatgtctgcacccaacatgccttcgatcgagagggagcggaggcgccggcaccacatgtccgtgtgggagcagcgtaccagccagctgaggaagcacatgcagatgtccagccaggaggccctcaacagagaggaggcgccgaccatgaacccgctcaaccccctcaacccgctcagctccctcaacccgctcaatgcccaccccagcctttatcggcgacccagggccattgagggcctggccctgggcctggccctggagaagttcgaggaggagcgcatcagccgtggggggtccctcaagggggatggaggggaccgatccagtgccctggacaaccagaggacccctttgtccctgggccagcgggagccaccatggctggccaggccctgtcatggaaactgtgacccgactcagcaggaggcagggggaggagaggctgtggtgacctttgaggaccgggccaggcacaggcagagccaacggcgcagccggcatcgccgcgtcaggacagaaggcaaggagtcctcttcagcctcccggagcaggtctgccagccaggaacgcagtctggatgaagccatgcccactgaaggggagaaggaccatgagctcaggggcaaccatggtgccaaggagccaacgatccaagaagagagagcccaggatttaaggaggaccaacagtctgatggtgtccagaggctccgggctggcaggaggccttgatgaggctgacacccccctagtcctgccccatcctgagctggaagtggggaagcacgtggtgctgacggagcaggagccagaaggcagcagtgagcaggccctgctggggaatgtgcagctagacatgggccgggtcatcagccagagcgagcctgacctctcctgcatcacggccaacacggacaaggccaccaccgagagcaccagcgtcaccgtcgccatccccgacgtggaccccttggtggactcaaccgtggtgcacattagcaacaagacggatggggaagccagtcccttgaaggaggcagagatcagagaggatgaggaggaggtggagaagaagaagcagaagaaggagaagcgtgagacaggcaaagccatggtgccccacagctcaatgttcatcttcagcaccaccaacccgatccggagggcctgccactacatcgtgaacctgcgctactttgagatgtgcatcctcctggtgattgcagccagcagcatcgccctggcggcagaggaccccgtcctgaccaactcggagcgcaacaaagtcctgaggtattttgactatgtgttcacgggcgtgttcacctttgagatggttataaagatgatagaccaaggcttgatcctgcaggatgggtcctacttccgagacttgtggaacatcctggactttgtggtggtcgttggcgcattggtggcctttgctctggcgaacgctttgggaaccaacaaaggacgggacatcaagaccatcaagtctctgcgggtgctccgagttctaaggccactgaaaaccatcaagcgcttgcccaagctcaaggccgtcttcgactgcgtagtgacctccttgaagaatgtcttcaacatactcattgtgtacaagctcttcatgttcatctttgctgtcatcgcagttcagctcttcaagggaaagttcttttattgcacggacagttccaaggacacagagaaggagtgcataggcaactatgtagatcatgagaaaaacaagatggaggtgaagggccgggaatggaagcgccatgaattccactacgacaacattatctgggccctgctgaccctcttcaccgtctccacaggggaaggatggcctcaagttctgcagcactctgtagatgtgacagaggaagaccgaggcccaagccgcagcaaccgcatggagatgtctatcttttatgtagtctactttgtggtcttccccttcttctttgtcaatatctttgtggctctcatcatcatcaccttccaggagcaaggggataagatgatggaggagtgcagcctggagaagaatgagagggcgtgcatcgacttcgccatcagcgccaaacctctcacccgctacatgccgcagaacagacacaccttccagtaccgcgtgtggcactttgtggtgtctccgtcctttgagtacaccattatggccatgatcgccttgaatactgttgtgctgatgatgaagtattattctgctccctgtacctatgagctggccctgaagtacctgaatatcgccttcaccatggtgttttccctggaatgtgtcctgaaggtcatcgcttttggctttttgaactatttccgagacacctggaatatctttgacttcatcaccgtgattggcagtatcacagaaattatcctgacagacagcaagctggtgaacaccagtggcttcaatatgagctttctgaagctcttccgagctgcccgcctcataaagctcctgcgtcagggctataccatacgcattttgctgtggacctttgtgcagtcctttaaggccctcccttatgtctgccttttaattgccatgcttttcttcatttatgccatcattgggatgcaggtatttggaaacataaaattagacgaggagagtcacatcaaccggcacaacaacttccggagtttctttgggtccctaatgctactcttcaggagtgccacaggtgaggcctggcaggagattatgctgtcatgccttggggagaagggctgtgagcctgacaccaccgcaccatcagggcagaacgagaacgaacgctgcggcaccgatctggcctacgtgtactttgtctccttcatcttcttctgctccttcttgatgctcaacctgtttgtggccgtcatcatggacaactttgagtacctgactcgggactcctccatcctggggcctcaccacttggacgagtttgtccgcgtctgggcagaatatgaccgagcagcatgtggccgcatccattacactgagatgtatgaaatgctgactctcatgtcacctccgctaggcctcggcaagagatgtccctccaaagtggcatataagaggttggtcctgatgaacatgccagtagctgaggacatgacggtccacttcacctccacacttatggctctgatccggacagctctggacattaaaattgccaaaggtggtgcagacaggcagcagctagactcagagctacaaaaggagaccctagccatctggcctcacctatcccagaagatgctggatctgcttgtgcccatgcccaaagcctctgacctgactgtgggcaaaatctatgcagcaatgatgatcatggactactataagcagagtaaggtgaagaagcagaggcagcagctggaggaacagaaaaatgcccccatgttccagcgcatggagccttcatctctgcctcaggagatcattgctaatgccaaagccctgccttacctccagcaggaccccgtttcaggcctgagtggccggagtggatacccttcgatgagtccactctctccccaggatatattccagttggcttgtatggaccccgccgatgacggacagttccaagaacggcagtctctggtggtgacagaccctagctccatgagacgttcattttccactattcgggataagcgttcaaattcctcgtggttggaggaattctccatggagcgaagcagtgaaaatacctacaagtcccgtcgccggagttaccactcctccttgcggctgtcagcccaccgcctgaactctgattcaggccacaagtctgacactcaccgctcagggggcagggagcggggacgatcaaaagagcgaaagcatcttctctctcctgatgtctcccgctgcaattcagaagagcgagggacccaggctgactgggagtccccagagcgccgtcaatccaggtcacccagtgagggcaggtcacagacgcccaacagacagggcacaggttccctaagtgagagctccatcccctctgtctctgacaccagcaccccaagaagaagtcgtcggcagctcccacccgtcccgccaaagccccggcccctcctttcctacagctccctgattcgacacgcgggcagcatctctccacctgctgatggaagcgaggagggctccccgctgacctcccaagctctggagagcaacaatgcttgcctgaccgagtcttccaactctccgcacccccagcagagccaacatgcctccccacagcgctacatctccgagccctacttggccctgcacgaagactcccacgcctcagactgtggtgaggaggagacgctcactttcgaagcagccgtggctactagcctgggccgttccaacaccatcggctcagccccacccctgcggcatagctggcagatgcccaacgggcactatcggcggcggaggcgcggggggcctgggccaggcatgatgtgtggggctgtcaacaacctgctaagtgacacggaagaagatgacaaatgctagaggctgctcccccctccgatgcatgctcttctctcacatggagaaaaccaagacagaattgggaagccagtgcggcccgggggggaggaagagggaaaaggaagatggaag

SEQ ID NO: 1179 - protein, 2251 aa, Homo sapiens
MARFGEAVVARPGSGDGDSDQSRNRQGTPVPASGQAAAYKQTKAQRARTMALYNPIPVRQNCFTVNRSLFIFGEDNIVRKYAKKLIDWPPFEYMILATIIANCIVLALEQHLPEDDKTPMSRRLEKTEPYFIGIFCFEAGIKIVALGFIFHKGSYLRNGWNVMDFIVVLSGILATAGTHFNTHVDLRTLRAVRVLRPLKLVSGIPSLQIVLKSIMKAMVPLLQIGLLLFFAILMFAIIGLEFYSGKLHRACFMNNSGILEGFDPPHPCGVQGCPAGYECKDWIGPNDGITQFDNILFAVLTVFQCITMEGWTTVLYNTNDALGATWNWLYFIPLIIIGSFFVLNLVLGVLSGEFAKERERVENRRAFMKLRRQQQIERELNGYRAWIDKAEEVMLAEENKNAGTSALEVLRRATIKRSRTEAMTRDSSDEHCVDISSVGTPLARASIKSAKVDGVSYFRHKERLLRISIRHMVKSQVFYWIVLSLVALNTACVAIVHHNQPQWLTHLLYYAEFLFLGLFLLEMSLKMYGMGPRLYFHSSFNCFDFGVTVGSIFEVVWAIFRPGTSFGISVLRALRLLRIFKITKYWASLRNLVVSLMSSMKSIISLLFLLFLFIVVFALLGMQLFGGRFNFNDGTPSANFDTFPAAIMTVFQILTGEDWNEVMYNGIRSQGGVSSGMWSAIYFIVLTLFGNYTLLNVFLAIAVDNLANAQELTKDEQEEEEAFNQKHALQKAKEVSPMSAPNMPSIERERRRRHHMSVWEQRTSQLRKHMQMSSQEALNREEAPTMNPLNPLNPLSSLNPLNAHPSLYRRPRAIEGLALGLALEKFEEERISRGGSLKGDGGDRSSALDNQRTPLSLGQREPPWLARPCHGNCDPTQQEAGGGEAVVTFEDRARHRQSQRRSRHRRVRTEGKESSSASRSRSASQERSLDEAMPTEGEKDHELRGNHGAKEPTIQEERAQDLRRTNSLMVSRGSGLAGGLDEADTPLVLPHPELEVGKHVVLTEQEPEGSSEQALLGNVQLDMGRVISQSEPDLSCITANTDKATTESTSVTVAIPDVDPLVDSTVVHISNKTDGEASPLKEAEIREDEEEVEKKKQKKEKRETGKAMVPHSSMFIFSTTNPIRRACHYIVNLRYFEMCILLVIAASSIALAAEDPVLTNSERNKVLRYFDYVFTGVFTFEMVIKMIDQGLILQDGSYFRDLWNILDFVVVVGALVAFALANALGTNKGRDIKTIKSLRVLRVLRPLKTIKRLPKLKAVFDCVVTSLKNVFNILIVYKLFMFIFAVIAVQLFKGKFFYCTDSSKDTEKECIGNYVDHEKNKMEVKGREWKRHEFHYDNIIWALLTLFTVSTGEGWPQVLQHSVDVTEEDRGPSRSNRMEMSIFYVVYFVVFPFFFVNIFVALIIITFQEQGDKMMEECSLEKNERACIDFAISAKPLTRYMPQNRHTFQYRVWHFVVSPSFEYTIMAMIALNTVVLMMKYYSAPCTYELALKYLNIAFTMVFSLECVLKVIAFGFLNYFRDTWNIFDFITVIGSITEIILTDSKLVNTSGFNMSFLKLFRAARLIKLLRQGYTIRILLWTFVQSFKALPYVCLLIAMLFFIYAIIGMQVFGNIKLDEESHINRHNNFRSFFGSLMLLFRSATGEAWQEIMLSCLGEKGCEPDTTAPSGQNENERCGTDLAYVYFVSFIFFCSFLMLNLFVAVIMDNFEYLTRDSSILGPHHLDEFVRVWAEYDRAACGRIHYTEMYEMLTLMSPPLGLGKRCPSKVAYKRLVLMNMPVAEDMTVHFTSTLMALIRTALDIKIAKGGADRQQLDSELQKETLAIWPHLSQKMLDLLVPMPKASDLTVGKIYAAMMIMDYYKQSKVKKQRQQLEEQKNAPMFQRMEPSSLPQEIIANAKALPYLQQDPVSGLSGRSGYPSMSPLSPQDIFQLACMDPADDGQFQERQSLVVTDPSSMRRSFSTIRDKRSNSSWLEEFSMERSSENTYKSRRRSYHSSLRLSAHRLNSDSGHKSDTHRSGGRERGRSKERKHLLSPDVSRCNSEERGTQADWESPERRQSRSPSEGRSQTPNRQGTGSLSESSIPSVSDTSTPRRSRRQLPPVPPKPRPLLSYSSLIRHAGSISPPADGSEEGSPLTSQALESNNACLTESSNSPHPQQSQHASPQRYISEPYLALHEDSHASDCGEEETLTFEAAVATSLGRSNTIGSAPPLRHSWQMPNGHYRRRRRGGPGPGMMCGAVNNLLSDTEEDDKC

SEQ ID NO: 1180 - DNA, 153740 bp, Mus musculus
  misc_feature (1)...(153740): n = A,T,C or G
gtttagagactggtagaggacatgcctacttacatattcaacatgaagtggagggaggaagagaagatggaacctgcctgtcatagggagaaccagagcaaatgtgcctctgtcaggggttactggggaaagaaatgcatcctgggagttactacccctgacctgtaagaacaatcctcctttttctctttttgggtcttttttttcagagacacttgagttgtgtaattgttttggaaaatatcttctagtacttttttgtgttggggtggttaatgcttgagaaatatcagctggcctttggtataatctgtggcttagttagggtttctattgttgtgacaagaccacgtcaaccaaaagaaagttggggaggaaagggttaatatggctcacacatccataccacagttcatcatcaaaggcagtgaggacaggaacttaagcagggcaggaacctggagtcaggagctgatgcagaggccatggaggggtgatcctaactggcttgctgcaatcccatggcttgcccagcctgccttcttattgaacccaggcaggaccaccagcccagggatggcaccacccacaatgggttgggtcttcctcccttgatcactaattgaaaaaatgccttacagctggatctcatgggggcttttcatctctgggatgactgtagcttgtctcaagttgacacacaaaaccagcccgttcaatctgatccgttggagcaagttagagctccctgggttggcttatggcttatgaacactctgtgagacgatctggtgtctgaaacactgtgttagtcatcagaaggcttggtgagcatagaaaaacggtctgcaaggaaggtctgatatggtggaaatctgggtaagggctggagagggcatgctcaagtggcccaaaagagcagtagtaaattggtaattcgcctattgtcccaggtttaaatctgccctctgtactctgttctgtgatgacagagctgggattttgcaaaccagacccaggggttcccctttatgggattcctcttaggttttgactgcaggagacaagaggcgcagtcaaaaggcagaacaagacaaagtcatttttctgttccttgatattaacgtcactgctgcagatatggcaccttcccccagcggtggcatttcacaccacggtgccagtctgctccagctcctttcctatttgcagaacctcaatgtgccaactcatattgtgccagaagaaaccccgtgtgaactgcctcaagtgtcaagctctaatttcctgatgtcccctccccgcagcacttcagtctgatctgtccacttttgttctccgaggcatagggtggtaactactgtttgaagtttgtctttctcccagttagccttccaagagccgtgtgaccaattcttcataatgacgctcttcaatttctgttgaaatattcagggtggggcgggtggtgtctgctttcttctgactaattttttttgtgtgtgtgtgcaatgtgtatgggtgttttgtctgtacgtatgtgtatgtagcatttgcttgatgcctgctggccacagaggtcacaagagggccttggataatctagaactggagttacagatgtttgtgaagtacgggaatcaaacctgggtcctctggaagagcaggaagtgcttttaaccatggagccagctctctgccccctcccccactgacaacatttctttaaaatatttgttatttttattatttctgcatgtgtgtgtgttatatctctctctgtgtctctctgtgctctctctgtctctgtctctctctctctctctctctgtgtgtgtgtgtgtgtgtgtgtgtgtgtgtgtttgagatatgtgtgctggtgcctatggaggccagaagagggcattggagcccctggagctgggacacccaacatgggttctggggatgaacatttgtcccctgagtgagtagcaatcacccttaacttcagatgtgtctctttatgcattctgacttatccagaagtagagtgaacttaaaagaaaaacagtcaggagtctaggcaacaggtagccaaagacttaccaggaacagcagtatgagtcttctagctatcttccttaactgggatagtgacatacatctaccttccattcttgttgggatgttaggaaacacaccagagtagagatttagaaggacgctggttgcacattacctaagtttacttgtcacagttttagtcgtaagagggagcatactgatgttacaaggatgcagtgtgttgtatgggtcctggggcagggattgctgctctatcttgggaggagtgtaggactgggaactggaagaccaccaggatctttactggtatcattttcttgcaggttactgcattccttctcctgggaattttcttcctctgtctgatcccataggctatatgatgcagagaacatttctgcctatggctttagggttgatatctccttgaaaatgagaactgggtagaatttttctctgcttcattttcaaattttttgtaagacagcatccaaagaacagcttggtttagatttctattcacagtcttgtcagctatgaccctggaagcagagattccctaatgaaagcatagattcaggtggcccgccctacgtgagagcgagaacagcataattgtgcactgagaagacattcaggcctcggcctgtcaggcttggtcttagtaatggcgatgatgaagcttggagttggagtgaagaccagcttttggtatcagtgtttgtttcagattgattctataaagatatgggggagtggtgagaaccgagccttcagataaggatccaggacctgcagggctgaagactcagatccaggacctgcagggctgaagactcagaacaggacctacccgtcatctgccttagatccaggagcatagcctggatttctcatgaaaaatttcactctagctctaatcttcaatcaattgaagaaataaaggttgcccattcactcagcaacaatgtgagcactcctatctctccagtgctgctgacacgccatgggaagactttctccagactccattcctcttatattagtcaggcttctcctagagaaagagaatggacataatgactctgaattaaatgaggattagttagagtgacttacaggctgtggcccagttggtctaacaatggctctctctccatggaaaggtcaagagtccactagttgctcagtccacaaggctgagtgctcgactgctctttggtcattgttggaacaccaaagaagtaggttctaataacagtgaaggaatgcctcggtagcaggattggggaagttgccaatgaaactgggggcaagtaggcaaacagcaaactcttccttcttccttgtccctgggtagtctgccatcagaaggtgtggcccagatttaggatgggtcatctgacctctaataatacaatcacaggagtgcccaactctgttggttttagatgattccagatgcagtcaagttgacaacaagatgtcccaggatgcagtcaagttgacaacaagatgtcccaagcccctgcccaagtcactcccacaattcctcactggtccagggatactttgctgattttcctatttattttgttagcacaaatctcttcagtggttcaaaagaaagcattttgtgtaactggacaaaatgtcttggacatgaagggccttggagaataaagactccatctgtcagtgtaacatctgagccttccttgaagcacaggaccaggaactgtctgggaatttgagtgctactgaccattccacactggacatgcacacagaaaattaacacagatgctataaattcttttctgctgtgaagaacgttgaatattagaagcaaggaggtggtgttctggtggtaactctgggcaacgtgatggactgacctgcaaagaggaagatggtatgaaatccttgaattgagattctgtagaggacaacatgatttttttatacttatttagaagctccccaacccaagtgacaatcacagatactatccctgcatgcatcccagtgccccgtggacatagatgaggagagtcatgcaaatctctaaaggtaagcctcaaaaagtaaaaataatttgaccttatgaaattggatccaagtagatcagtggagactgttgttcctcccaacacactggaaaaaccccatccaggaagagtggcagctgagggtcttcacatttcacaaagagggttatggttgtgtatgcaacaagtacaccaaactgtgacagagtcaggaagacactgctgttcctcagactctattttgctgtgacagatacatgtgtgagatgctgggagataggtgttgctgagtgcaggataaagtacaaatgtcaggagggaagggaatcaggatacatacaaagctgaccatgagtgttgataaacagccaagttgttgaaaatgttgttccctgaagacgttttaaaataagctggtctcttagccaagggtagtgcagcgctccagccttatagccagaagaaaggtcatagtctttaggataatgctgcaaagcaaactgttccagcactttttgtaaccatcattttgttcaggagcccacagccaagttaaggttccgtgtttcttggttttgttttatttcacccttcatctctggaggtctgctaggcgagaaaagacaaagcagaaagcaaggaaagcaactggtgtggtcactagaatcagatgactgtccagtctagaggctctgggaaggtttgccattgtcacccaatgggcagagtgggtattgaacagtgtaagaactgtgacataagctgagatgctgccattccctggacaaaatcttcaaatgagctactgcttctcaggcccccctttccttatgtgaaacatgaggatattaatatctgcattgagtgaatattggggctgtctgaggactggatgaagtcatgtctgcgaaggcactctttaaactgtcatatactatatgtggcattgttctaaacgaaggctgttattagacgcgttctcacgcccggccaggaagaacgcaacagaccagaatcttctgcggcaaaactttattgcttacatcttcaggagcaggagtgtaagaagcaagagagcgagaaaacgaaaacccgtccctattaaggagaattctccttcgcctaggacgtgtcactccctgattggctgcagcccatcggccgagttgacgtcacggggaaggcagagcacatggagtggagaaccaccctcggcacatgcgcagattatttgtttaccacttagaacacagctgtcagcgccatcttgtaacggcgaatgtgggcgcggctcccaacatctccccctttccttttaataagagcaaataggccacccatattaatgagagtggagatagaggtcaaatccccagtgtgtaggtaaaggagccatgtacaggattagctcttaggctcacaggcttttacccagagcaaccctgacctgctcccgtgtcgttttgcctggagagaaggacacttggacactcaaccttcttgaaagatgacatgtctccctagaataggctcatatatgccgcagagcctttctactgcagtgcttagccgtgcaactctctcgggctgctgaagcacactcactctatcccgtgcaatgagactagcctcatgggatataagagctgagtggccagcgacctattgcctaagcatagataaccatatatcagggggagcaccatgttctagagctgcaagcgcctgggcaataaccaccttgtctctcctagtttaggccttaagcttacagaccaatcaaagaagcaacactaatccacagcaaagtgtatctccaaataatatcagtcccacccattctttaaagaagggaaatgttgaggagatccaattgggtaatcctttggtcagggacaggtccaagtgcgtggagttgacctgaagtctcaattcccgaaggatctgttcaaattcagccgtccaattctgtaacatatactgaaaaagactttttgacaaattagctgccctagtaaatttaacatactgaatggaaataacacacaatcccggaaacttttgttcacatccctgctgagttatttgtcataatacatctagttgtatctgaacaagatctatgagttgattaaccagcatgagatctccctgtatcttgacattagctgaggcctgtttatctatgactgtagtcactgaggctgacaaagtgttaatggtgtcagttgtctggacctgtccagacagagccaaggctgtctgaatcaaggctaaacccagttcctagttagtgtaaaaaggcaggagaatacttgagcattatacatcaccgtcattgggagtggaaatgtcgacattatcccccaacgctgctctctctttattattgacgccctggacatcaccaagacgagggacatcagtannnnnnnnnnnnnnnnnnnnnnnnnnnnnnnnnnnnnnnnnnnnnnnnnnnnnnnnnnnnnnnnnnnnnnnnnnnnnnnnnnnnnnnnnnnnnnnnnnnnnnnnnnnnnnnnnnnnnnnnnnnnnnnnnnnnnnnnnnnnnnnnnnnnnnnnnnnnnnnnnnnnnnnnnnnnnnnnnnnnnnnnnnnnnnnnnnnnnnnnnnnnnnnnnnnnnnnnnnnnnnnnnnnnnnnnnnnnnnnnnnnnnnnnnnnnnnnnnnnnnnnnnnnnnnnnnnnnnnnnnnnnnnnnnnnnnnnnnnnnnnnnnnnnnnnnnnnnnnnnnnnnnnnnnnnnnnnnnnnnnnnnnnnnnnnnnnnnnnnnnnnnnnnnnnnnnnnnnnnnnnnnnnnnnnnnnnnnnnnnnnnnnnnnnnnnnnnnnnnnnnnnnnnnnnnnnnnnnnnnnnnnnnnnnnnnnnnnnnnnnnnnnnnnnnnnnnnnnnnnnnnnnnnnnnnnnnnnnnnnnnnnnnnnnnnnnnnnnnnnnnnnnnnnnnnnnnnnnnnnnnnnnnnnnnnnnnnnnnnnnnnnnnnnnnnnnnnnnnnnnnnnnnnnnnnnnnnnnnnnnnnnnnnnnnnnnnnnnnnnnnnnnnnnnnnnnnnnnnnnnnnnnnnnnnnnnnnnnnnnnnnnnnnnnnnnnnnnnnnnnnnnnnnnnnnnnnnnnnnnnnnnnnnnnnnnnnnnnnnnnnnnnnnnnnnnnnnnnnnnnnnnnnnnnnnnnnnnnnnnnnnnnnnnnnnnnnnnnnnnnnnnnnnnnnnnnnnnnnnnnnnnnnnnnnnnnnnnnnnnnnnnnnnnnnnnnnnnnnnnnnnnnnnnnnnnnnnnnnnnnnnnnnnnnnnnnnnnnnnnnnnnnnnnnnnnnnnnnnnnnnnnnnnnnnnnnnnnnnnnnnnnnnnnnnnnnnnnnnnnnnnnnnnnnnnnnnnnnnnnnnnnnnnnnnnnnnnnnnnnnnnnnnnnnnnnnnnnnnnnnnnnnnnnnnnnnnnnnnnnnnnnnnnnnnnnnnnnnnnnnnnnnnnnnnnnnnnnnnnnnnnnnnnnnnnnnnnnnnnnnnnnnnnnnnnnnnnnnnnnnnnnnnnnnnnnnnnnnnnnnnnnnnnnnnnnnnnnnnnnnnnnnnnnnnnnnnnnnnnnnnnnnnnnnnnnnnnnnnnnnnnnnnnnnnnnnnnnnnnnnnnnnnnnnnnnnnnnnnnnnnnnnnnnnnnnnnnnnnnnnnnnnnnnnnnnnnnnnnnnnnnnnnnnnnnnnnnnnnnnnnnnnnnnnnnnnnnnnnnnnnnnnnnnnnnnnnnnnnnnnnnnnnnnnnnnnnnnnnnnnnnnnnnnnnnnnnnnnnnnnnnnnnnnnnnnnnnnnnnnnnnnnnnnnnnnnnnnnnnnnnnnnnnnnnnnnnnnnnnnnnnnnnnnnnnnnnnnnnnnnnnnnnnnnnnnnnnnnnnnnnnnnnnnnnnnnnnnnnnnnnnnnnnnnnnnnnnnnnnnnnnnnnnnnnnnnnnnnnnnnnnnnnnnnnnnnnnnnnnnnnnnnnnnnnnnnnnnnnnnnnnnnnnnnnnnnnnnnnnnnnnnnnnnnnnnnnnnnnnnnnnnnnnnnnnnnnnnnnnnnnnnnnnnnnnnnnnnnnnnnnnnnnnnnnnnnnnnnnnnnnnnnnnnnnnnnnnnnnnnnnnnnnnnnnnnnnnnnnnnnnnnnnnnnnnnnnnnnnnnnnnnnnnnnnnnnnnnnnnnnnnnnnnnnnnnnnnnnnnnnnnnnnnnnnnnnnnnnnnnnnnnnnnnnnnnnnnnnnnnnnnnnnnnnnnnnnnnnnnnnnnnnnnnnnnnnnnnnnnnnnnnnnnnnnnnnnnnnnnnnnnnnnnnnnnnnnnnnnnnnnnnnnnnnnnnnnnnnnnnnnnnnnnnnnnnnnnnnnnnnnnnnnnnnnnnnnnnnnnnnnnnnnnnnnnnnnnnnnnnnnnnnnnnnnnnnnnnnnnnnnnnnnnnnnnnnnnnnnnnnnnnnnnnnnnnnnnnnnnnnnnnnnnnnnnnnnnnnnnnnnnnnnnnnnnnnnnnnnnnnnnnnnnnnnnnnnnnnnnnnnnnnnnnnnnnnnnnnnnnnnnnnnnnnnnnnnnnnnnnnnnnnnnnnnnnnnnnnnnnnnnnnnnnnnnnnnnnnnnnnnnnnnnnnnnnnnnnnnnnnnnnnnnnnnnnnnnnnnnnnnnnnnnnnnnnnnnnnnnnnnnnnnnnnnnnnnnnnnnnnnnnnnnnnnnnnnnnnnnnnnnnnnnnnnnnnnnnnnnnnnnnnnnnnnnnnnnnnnnnnnnnnnnnnnnnnnnnnnnnnnnnnnnnnnnnnnnnnnnnnnnnnnnnnnnnnnnnnnnnnnnnnnnnnnnnnnnnnnnnnnnnnnnnnnnnnnnnnnnnnnnnnnnnnnnnnnnnnnnnnnnnnnnnnnnnnnnnnnnnnnnnnnnnnnnnnnnnnnnnnnnnnnnnnnnnnnnnnnnnnnnnnnnnnnnnnnnnnnnnnnnnnnnnnnnnnnnnnnnnnnnnnnnnnnnnnnnnnnnnnnnnnnnnnnnnnnnnnnnnnnnnnnnnnnnnnnnnnnnnnnnnnnnnnnnnnnnnnnnnnnnnnnnnnnnnnnnnnnnnnnnnnnnnnnnnnnnnnnnnnnnnnnnnnnnnnnnnnnnnnnnnntctctctctctctctctctctctctctctctctctctctctctctctctcgcagtgagggaaagagagtaaaacaaactttctggaggagggctcagcgctcagctctcatggccaaaatacgaaagatcagctccatgtgtgtgactcaactgtccaggaaatgagaatcgcaagagactccaaacctgacgttgtgcttatagcttcagctcgagtaagaaaaatgaggtggggggagtaccccatgacgggactcgagtctcagatgcaggagaaaggcaccgagaggcatggtggcaagaaggcaaaggagagctgcagctttaagtcctcctatggttatacatatttttcttctatgaatgggttttgctgtaaattatagctttgctcgtggtcccttgggtcaaaagaaatagtctccaaactgcaaacagctctgattggtgacttgccttcttccctccccaacccccttcctaattgaaagcaaatgtgcaatatattggatgctgggatccttggcgcaggcccaggaatcctcagaatgtgaggtctctctcaaaggcatcttgcatcagcctgtggatgtatgcctaccacggggctccttcaccggcaaagtggaaaaagaaggggttcccgagaaagtcttctgggttgggggaacctattggattataaccgtttccttctcttcaaacctgggcgtccctggactggaagtaagtgatgtggctccttcctccctgcccccaccttcgttttcttttctaaaaacgaaagctctaagtggacttctcttggtgtgtcaggaaaagttcggaaaagcggcagagggcagagtttgaatcagggcggaagggcagggagctgggctcttcaagactcaggaccgaggcagatctcatgttttggggtctggatttgtgtcagcgagggaagaacaggcgccaataaccaaagaaggctgaagcgaggtacaggactccatagcagctgcaagtacaataaacagttttagcagagctggaaatgttggcaggcaagacaggccgatcgcagagtcgggctgctggagagaggtgagccaggagctgtgttttcaggctttgagcactggggtttgagggacctgagttttggtgagaacgtggcctagtaccttttgtgatttaattgtgggaagggagactgtggctgcgggcttgggatgaggggtggcttcacctttggtcttgggtaaggttgggcgggaaggccagctgcctggagggtttgcagtgggtgacacgaagcaatcacttcccagactctccttctccccagcgttgggtgctgttctttttgttgtcagagggccggtctgttagcagttgggacccagtgttctggcctacccatctaagggacagagttctctgcaagtggcagacatacttaggtcagccatttgaggagagtttggagaactcaaggcagcggcgcctttagcaccatcttaactgttcagctttccgcatccttccctagtggcaattggagcgtggaaaggggggtctttgcaattgctgcggtctcttctgacccgttcattacacagatttcagacatgttagcacggccctagtgcctgttgcactccacgcttatgccttcagacttatttttaagatttaggagagacaatggggcaagtcttctccgggcgtttatcagctataaaaagatggtagaagtggttcatcagctggtggtccttggtgtgtgtgtcaatgttggtgtgcacgtgtgcacgtgtgtgtgtgcacatgtgtgtgcacaaatgaaacaaaaaaaattaacatttgagtccttgctctgaccagcctccagatattttcctgttatttgattcacggttctgtaaggcaccattcctgttttacaggaaagggttttaagacagagaagtgaaatgaattgttcgaggaagcacaactaatgtgcttaaaagttgttacatccggagtctggtcctccgactcaccgtgggcagttctcccgtctcccactccacacttggacttgcttacttctggagtcaaacttcatgtttcaccgggtgaccaggaggtacccatgccaggctaagggaacagtttggatttgcactcagagaaacacttgcccgggtatcagatggaggttaaattccaggtactggatgtctgtttagctttgtgatgcagagagcctgggacttttagagttggtagacccaggttaggttctgtctctatctttgactgcttcctgcacttcagcctctgtgttcactacatggaaatgagaatactcttgagttttactgttttagactcggacatgaatgcattctggaggctatgaagggcttcattaggtcagctcttatggttgtaatgaaatgtgaccgaatgtactggaaattagcttttgtcaggctgggtctggcagttggtgcagacccgtaagactgtgccaaactctgaaatggggagtggctctatcttcactcctatctctttgtgtgtgcatacctgcacacgtgcgtgtacaggtgcacatgtgcaggtatgtttgtgtatgtggaggcctcggtgataggatccctcagtgccctagtgctcactcagtaggctgggctggctggcctctgggctccaggaatcctcctgtctctgcctctgtgcatttcaggagactaaactcaggttctcatgcttgtgtgatttgtgtgataagtactttacacactgagatatctctccaggtcttcatgcctatcttctaacgggaaccatcctgcctcatggggaaatactcctggattttctctctaaaaattcccttgtaggtctggtttgtgtatggtttcttatctaaaatggagtgggttgaaggtcaataggttactcgaagcatctctggatctgcattgtctctgaatgagcaaggtttaatctggaggagcttcgtggccagctgaggacaggtcctgagcccagggacatcttatcactggcaagtgcatctcccttcatcttcctgttctgagcctgcagtcagaaaagttgcagttctcctgaagtaagagtctaaggctagcctgtgggggcctccacgtctgtttctgcttaagatccagttgcttgtagaagtgtcgcgggggcaaagcagaagcgctatccagagaaagtcctccattgtctcgcctccaaaaccttcccatataacttccttccaggcttacacagtcacttccgggaatggaagccatttgggtctgtattccccatagggaattttgttctaacctctccacgtgatagcatttttaacagatgttctaataaagacagagtgcttcccgcctatcagtgtcatgccacatacatttagctttaattcagatatccatctcaactttctttggaagatgcatcgtctggtattctatatcacctcaaacacataaggcaaatcagggcccagctaaaaatggactaccacgacatgctagtgcgtgctggctcacatcaatgcggacttgtctgcaatacagacacactagactctttatgtgcttggcctgctgacagctgtacaacatatgaattgcttgactctttccccaccaggccatgaatgtgcccaatatctccacgcatcccagagttgctctgaattcagcacctggattaaaatcctcacagtgtgtccttacagctgagaagatgatgttttaatagacttgctcagcagtaatttggaaccccaggtaggccttaaggacttctagaccagttaaataaaaataccaaaaggtggaaaacaagagtgggtagtttgttacccaggtcagaattccaccacnnnnnnnnnnnnnnnnnnnnnnnnnnnnnnnnnnnnnnnnnnnnnnnnnnnnnnnnnnnnnnnnnnnnnnnnnnnnnnnnnnnnnnnnnnnnnnnnnnnnnnnnnnnnnnnnnnnnnnnnnnnnnnnnnnnnnnnnnnnnnnnnnnnnnnnnnnnnnnnnnnnnnnnnnnnnnnnnnnnnnnnnnnnnnnnnnnnnnnnnnnnnnnnnnnnnnnnnnnnnnnnnnnnnnnnnnnnnnnnnnnnnnnnnnnnnnnnnnnnnnnnnnnnnnnnnnnnnnnnnnnnnnnnnnnnnnnnnnnnnnnnnnnnnnnnnnnnnnnnnnnnnnnnnnnnnnnnnnnnnnnnnnnnnnnnnnnnnnnnnnnnnnnnnnnnnnnnnnnnnnnnnnnnnnnnnnnnnnnnnnnnnnnnnnnnnnnnnnnnnnnnnnnnnnnnnnnnnnnnnnnnnnnnnnnnnnnnnnnnnnnnnnnnnnnnnnnnnnnnnnnnnnnnnnnnnnnnnnnnnnnnnnnnnnnnnnnnnnnnnnnnnnnnnnnnnnnnnnnnnnnnnnnnnnnnnnnnnnnnnnnnnnnnnnnnnnnnnnnnnnnnnnnnnnnnnnnnnnnnnnnnnnnnnnnnnnnnnnnnnnnnnnnnnnnnnnnnnnnnnnnnnnnnnnnnnnnnnnnnnnnnnnnnnnnnnnnnnnnnnnnnnnnnnnnnnnnnnnnnnnnnnnnnnnnnnnnnnnnnnnnnnnnnnnnnnnnnnnnnnnnnnnnnnnnnnnnnnnnnnnnnnnnnnnnnnnnnnnnnnnnnnnnnnnnnnnnnnnnnnnnnnnnnnnnnnnnnnnnnnnnnnnnnnnnnnnnnnnnnnnnnnnnnnnnnnnnnnnnnnnnnnnnnnnnnnnnnnnnnnnnnnnnnnnnnnnnnnnnntcactattttcccatgtattacttgggaaagtcctatcttcactgtagctacaatctccattgtcttgctcatccacttttattctctttgtttgggggagggtcagataaagtaatggaagctggaaagcattgtttatacaacaatggtaggtagggatgacctttggtttctttcataggaagctgtccagtaaaatttgctgaagcatttgttaagtcttttgtaaagacttaaataaaaaccctaattgtgtgtgtgtgtgtgtgtgtgtgtgtgtgcacgtgcacatgtctgtatgtaaacactgaggtcagagaaggtcactgaaccccctggagcaggagttacaggcagtgatgcactgcctgatgtatgtgctgggaaatgaactcaggtcctctgtaagaacagcaagagttcttaaccgcggagccacctctccaacctctgtgtttagggtcttaatggcctaggatactggaataaactgagatgggagaggaagtaatctagtgcttttcaattttcctttttaaatgtagtatattaggaatttataaaacatgaaacagctaatctcagaattatcttgtctaaggcaaaaagtttctcattagctttttcttcccaaatagtgttattctcaaaagccacaggtatattttatgaaaatgttaattgatgtacaaaaagcatatttctatctattataaattgtatagcattctggcatcatctaccctaattttgtttttctctattgatttagtaattcttcagcaaatatttatttggtatctaccctctaagttctacattttagtgattataataatttattatcatttatttttttctttttaagtgtatgtccatattcatgtgtggataaatctctctctcctcaagtaagctagtctggccagccagtgaactctagagctctgcctgtctcttcctcccaggaccaagaattgcaagcatgcacaaccatgccagtctctcattttataaaacatggattctgggccatccaacctaggtccttatgcttgtgcaggaagcactgtgcccacggggccagcatcactgcctggccctgcaggaagcactgtgccaacagggccagcatcactgcctggtccttcatggctttagacagtcattgttttaggttctggggtacatcacatggatttggactaaagctgacttggaaaatggtttttcaaagttaggtaataagattgtacattttcaggtttgctgaagtacgattaaataactcagcaataggaattcagaaatggttcccgtacgtgataggagagccagatgttttacaaaaagactgaaagatttgtgttttatttttcacaatttccttaagaaattaataggctttatattttatagcaactttagctctacagaataattgagaacagaatatcgagttctcttaaccttccactctctcacttggttgccccgctggcaacatcttgcattggtaatttttatttttatcaaccattcaatatgtacgtattaaacatttcatgtcctctgttagttattacagaaggataagagaaatatatcacatttatttctttgaaaccatgtataatgatacgtgttcatagtttaaggtcctgtttatttaaacagctgctgcgcccttagtacttgcccagcattgctagagctgggacattgtaggcatccactgattgtgtgatattaacaggtaaaggatctagaagccaaacataatctgtctttaggatttaggagacacagtcacacccagctgtaacagaagaaaatctcaaaagcaatacagagcagtgcttaagcaagggtaggggagacaggtatcagcaaaggcaagcaaaccactgcccacatgaccagtgtcttggctgggacgggcccagggggtgcacggagagcactatgctcctcctcatctctgttgatctccatcagcatcgagtcatgcttatcattccacatctgcatcaaagactgaagacaaaccacacagctcatggcaaggcaggagaaggtgtatgtgtgtgtgtatgtgtgtgtgtgtgtgagattgtgtgtatgcatgattgtgtgtgattatgtgtgtatgtgtttgtgagtatgtatgattgtgtgtgtttgtgtgtgtgtgattgtatgtgtgtgtgattgtgtgtatgtgtcatcattgtgtgtgtgtgtgattctggaagatctaaagcaccatcactcagatacaaatgcttcacatttcttaccgggagtaaaatgaattaggattttggtttgtaaaaggaactcataccctggcaatcctcataggagctgcatcgaaatgctttgccatcctgcaacttcatagacgctaataaaacttagagggtgggtcagggttacagagatctttacaggacaacaaccaatataacgaaacagagggtagaagttacattctctccagaagtgttaactcttactggtgaccaggtacagctctgcttgcttgctcattgttgagtcagactttgactctgtagcccaggctagcctggaatttaactatatagctcaggtagacctgaactcaggatgatacttctgcgtcatctttccaagtgttagacttagcgggtgtgcactgccacacctggctcagacacttttctaatcttaggatgtatggattatatagctttaaaattaagaaggtgatgataatgtaaaaatagcataagaggaaattaaagagaaacatagattgctgcttgctagccttggttgaatcatgatataccctttttacagaaatgaattaccttttcaagttaaaaattcccattcccaacccacgacctagcaagttatttggggggatatggagatcggctgatggtgaagcttacgtggagtcccgagatcatgcggtggtgcatacctgtattctggcactaggaaggccgagtcaggaggatcctgttcaaggccaacatacagtgataccccgcttcattgaaataatgtttctatggggagcatatagccagcatagctgactctatgttgatgaaggaatacagttgaagaggtggtaccttatgagtttagggttctctataaagctacagtaatctaggcagcacagtactagcaaagaacagtgtgtaatagcatggagagccctaaatcgaccaacacaaatacattcagagagtattggacaaaggagtaagagccgtacagcaaagacaaggaagtcttttttcttagcaaacccaaagattgtagacaatcactgccatccttcacagaagttaaagagtatcccagacccaactgtgcatttgaagctacatgaaggagataagagataagctacaaaccattaaaattaacttcctccttgttaaagacaatgtcaagagaaatggggatatcaaccagagattagggaaaaacatttgcaaaagttgttttctaagaaatacaaagaaagctgggcgtggtggcacacgcctttaatcccagcactcgggaggcagaggcaggcggatttctgagttcaaggccagcctggtctacaaagtgagttccaggacagccagggctacacagagaaaccctgtctcgaaaaaaaaaaatacaaagaaaagagacattcaactttggagcaaacagacaattgcttaaaaaaaaaaaaaaaacgatgaaatacttgaagtacacttcaagagagacggagggcacacacacacacacacacacacacacacacacagagtcagattcccataaagctacacacacacacacacacacacacacagagtcagattcccataaagctacacacacacacacacacacacacacacacacacacacacagagtcagattcccataaagctacacacacacacacacacacacacacacacacacagagtcagattcccataaagctacacacacacacacacacacacacacacacacacacacacacagagagagagtcagattcccgtaaagctacacgtgctttcaccgtaggctgtagcaaatacacactctaatatttgcttagatgaatggaagactttggccacacagaactacatgtgacttttatctgaatctagagtggccaagatagccttcagtccaagtgacacctccctcagtgggggacgctcctgtgaaggcaagaagcataggggaaacatcgcagtgtttgctcagttcctctgtaacccagagctgctctacagaaaagtgtaattaagaacatatccccccccccagcctgtaagtactaacactatgactctatctttagctcttttttatctgaaggaaagtattgtgatataataatagctgggcattatttttatttcaaaatgattgattatgtgcctttgatagcatcattgtagcagttgtattttaagattgaatagtattattttacttaataaagcaatgtgaagcagaaactttaaagattaccggttcaccgcaagtatccaagcgctccaggggatatttgataagataaaaatcttcttgccacatgacaactattacttaaatgaccatcatttacattattatagctatgacaacagacagataatcttgcttaatatcatcctatcataatatcctaagatgttatggttggaagtgcagtagaccaagggttaataggctgcaattctgattttaactttgcaaacttttaacagtgagactttgcatggctattgttcacgtctttgcacttgaaatgttcttttgtgggctggcagaatggctcatggcacgacaagtgaagttgcttgttgccaaacaaagaccactggagttagttcactgtgggcctgccatagcaaagggaaagaactgactctctcaagtcacctctgaccaccaccacacatgtgctgtggtccacatacacgcacacacagacgcatgcatacatacaatagataagcagatgtaaaaacgtaatgctcatatctagaaagaacatcacaaaatcccagttgggttctgataaacattgcctggaactagcacccacacccagagtcatttcacagtaaaaccttgagtcatatctgctgctctctgaatagatccctgtctccctgcacctcagctaaatagtcctcttcttaaagtgcaagcttcagtttcagtgttcatgcagctcagatcatatatacatatatatatatatatatatatatatatatagtgtgtgtgtgtgtgtgtatacatatacatatatatacatacatacatatacatatatacatgtgtatatatatgatgtacacacacatttttattaattacattatttacttacatctggatcgaagcttcctctcccctcctctcctccctgtctctccctctcccctctcccctctcctcactcccagctacccctcctccccttctcctctgaaaaaggggagacctcccagagatatcaaccagccatggcacgtcaagttgcagaaggactaggcacattggaatcttctcctattgacggtacgggaaaggggttcaaaggcaggcaatgtagtcagagacagattcctcactaggagtccctcatgaagacacagccacacaactgttacatatgtgtagctcagatcttatttattggaattccaaggattttttttccctaatttttgtcaggatgatccagttaagcaaggaccatatgtaacttaggtggtctctataaatcactttgagcaaaacccataaatgagttcttaactggctccttaaaataggctttttatatgccctccacagttctgacttgggaaatttcttggacaggagcaatgaaagcctctcaattctgtttttgagaacataaaagaattcagtgtctgttaattgctttcgctgtcagatcaggagtcaggtcgtgtggaaatgacctaagcactgaatgtactgttgggagctctgtggtcaaattctatttcttatacattgtaacagtcgaagaaagaggctggtgtcttcatgaatatgttaaaattattatagtttaaaaattaaatattataaaagtattaaaattacattttaataaaggaagagagacagagccttctcacaggttgacagaggggtagacgtggtttgtgagaaatattttgttaggactatcctcttgccatcacgacatgaatactgtgtgagtctagtttataagaaacaattcagcttcttgagtgatcagttattaatgtgctattaatacatgtataaatctggggctgcatagatggctggatagatggctggatagaggatgtgagttcaggtcttagcacccatatggcagctcacaggcagatgtaactccagtttgggggcttccaatgctctatgctggcctctgtgggcaccaaggactctcatggtgcatatacatgcatgcaggccaacactcatacagatatgataaaaacttcaaaatagttttggaaatgtataaatatgaannnnnnnnnnnnnnnnnnnnnnnnnnnnnnnnnnnnnnnnnnnnnnnnnnnnnnnnnnnnnnnnnnnnnnnnnnnnnnnnnnnnnnnnnnnnnnnnnnnnnnnnnnnnnnnnnnnnnnnnnnnnnnnnnnnnnnnnnnnnnnnnnnnnnnnnnnnnnnnnnnnnnnnnnnnnnnnnnnnnnnnnnnnnnnnnnnnnnnnnnnnnnnnnnnnnnnnnnnnnnnnnnnnnnnnnnnnnnnnnnnnnnnnnnnnnnnnnnnnnnnnnnnnnnnnnnnnnnnnnnnnnnnnnnnnnnnnnnnnnnnnnnnnnnnnnnnnnnnnnnnnnnnnnnnnnnnnnaatatgaaactaggtacttctaaatgcttataagctcatacataggtgtagtggctattccctggttgtcaacttgactatatttggaatgaactaccaatccagaattggaaggctcaccagtcacccttatctggaggcttggagatagaagtttctgatctggatcttggtatggagaacttgaggcatagtggctatggattccagaagactaaattctccaagttcaaggtcatccgggattaaaggtgtggtggaacacacctttaatttgggctacacctttcatctgggattaagggtgtggtggaacacacctttaatctggctacaccttctgctggagacaatataaggacattggaagaagggagtcttgctcttgctcctttgcctgcttgctgtgtgagactgagtaactgctagatctttggacttccattcacagctgcgactgaaccattgttgggaattgggctgccgactgtaagtcatcaataaattcttttactatatagagactatccataaattctgtgactctagagaaccctgactaatacagaagttggtaccaggagtggggtattgctgtgataggcctgaccatgcttttatttgaaagaatgtggattttgggactttggatttggaaaacagtggaatgctttaaatggggcttaattggtcatcctagtaggaatatggaagactttgttgctgggagtaatttgaactgtgttgacctggcccaagaaatttcaaaggagaagcatttcagtatgtggcataaagactgtttttgtggtattttggtgaagaatgtggttactttttgcccttgtctgaaaagtctgcctgaggctaaggtgaagagacttggattaattgaattaactgcattgacaaaggaagtttcaaaaaagcccagcagagactctgttctctggttaagtctcacaaagagaagtttgaacaagcatagcaagcttagaaaggccaaatataaaatatatggttcgagtattaaaggcataccaggaagtgaaatggagcaaaatcctgtgttctaggagatagcagattaaggagtgggaccttggggcaaaatcctacccagctaaattaaatccaggtatagtggtacacacctttaatctcaggagactggcatgctgatctctgcattcaaggtcaatctacagagcaagatccaggatagccaagcttaggcagtgaaggatttggaaaacagaaagccagtgacattgtaatagcacaagcaggtcatgttgtagttcctgcaagcagcaaaactctgcagcttcagccacgtggctctgtctctagagttaagaatggaaggaactactgggacaattgatgctggttagctggagctaagaaattagcagtgattaagaagagaccagcatcactgaggtgaaatcttctgggaagtgttttctgggaacacaaagaagctatgttccagagatagccaaggttgtacctcttgctgcagctggacttggtaatatgtaagagtcacccaggtggtactggttttgaaggcatgaagatgtaatgaagaacagctgaggcttggcactgtgagaggtcatggaaggccattggagaaggtgtagcctcagctgtagttgatggcccaggactgaaggggtcatgcaaaggaggctattggtgaagcctagttggagtggaataccccagtgtattggagatgtcagtaccatggagtgatcaccaagagctgcagctgtagtggagtggatcaacctgagcttagagtgctacagagggcagagctggagaagtgatgccagcccttaggaggagtctaaaagatgaagtggaatcccagacactgaaacaagaagctgtaacattgaaattgccttggagactcagagatgttaaagatgccagagccatgggatacatgctgaggaaagctgctaacagggagtggaaacagcccaggagaaagcagtttgttgcagtcaacaaagatgaaaaaggagtggagatctgaagatcgctttgacatcagccatggagatgcagagtttggaatttgcccagctggtttcctgccttgctttggggattacagttaattaagttgaatgaatctcagaagagaccttgaactttggacttttaacattgttgcgactgctatagactatgaggactttgaaagttggactaatggcccccatagactcatgtttttgaacaagtctatggggaccagggagtggaatgtaatggtttatatatccttggaccagggagtggcaccatctgaaggtgtggccttgttggaataggtgtgacctggttggaatgggtgtgtcattctgggtgtgggtataagatcctcaccctagttgcctggaagtcagtcttccactagcagcctttggatgaagacatagaactctcagctcctcctgcgccatgcctgcctggatactgccatgctcccaccttgatgataatggactgaacctctgaacctgtaagccagccccaagtaaatgttgttaagagacttgccttggtcatggtgtctgttcacagcagtaaaaccctaactaagacaataggtaaccataaagctaaaataaatttattattagtgcaagctaaggtcaatttattggtgcaatcaaatgattagtgaaatcagattcagttacgagcgtggctgtaatgggacagatgatggggctcggtgtgaatttatcatgagtgaggaagctagtggctggcactgaacagccttttacttgtaacttgggtttattatattatattattattataatacttatgcagagaaggcttgctggtgtaggcccattgaataaattgtcttagcctcgaggatttattaacttagaagacttggatctcaaccaaaatgcattagcagttaatggtcaattgttaggttttgttgttgttgttttggttttttggtttttttgagacagggtttctccgtgtagccctggctgtcctggaactcactttgtagaccaggctggccttgaactcagaaatccacctgcctctgcctccggagtgctgggattaaaggcgtgtgccaccacacctggccaattgttagttttaaatttgaccattgactaaattgctgtattatttacttgtctcatttctgtgaccaaatgctcccccctaaaaaaaatcttaaagaaagggctgtttttcactcatggttagtggatgcggaccatcatggcagggggcgagcagagcaggcatggtggggagtgtggccctagctgtctgtgcaggagtgtgaggtagccactgtagacattgggtccacagtcaggaaacagagatggatgctggtagtctgctttttccaattctcttttcttttttaattcagtctgggacccaagtccatggtatggcaatgctgtcttcaaggcaggattttcctccttagtaaacttctgggcattctctcaagggaaggtctgcagtgtatcttctaggagattccagtgaccattaagataaagtatcacaattgctaactcacttgacgacaaggttaacattgtggtgacattaaaactgggactaaatgtgcatttaaccccattactaatagaagctggacgaaatcattcaggtgtgtgggtttctgccctagctctctgtgtataagctagtacacgctgccatgtaagatttcagattccaaagctcacatctgcccgcagcagaacagctgtgtctgaatagattaaactgcctcatgtccagcagagactcagtttccccactgcttcttctctttccagattggtttgatctggcttttgtttgatgtttgcacgattacaaacacaaatgaaaagctaggtgctaagactgaatggatgtcgccacctagctatctcttatactaaaagtcaaactagagaattgaagatatagtcattttataaattctagaaatcgtgtgggcttcaagaatacattgacaataacctattacaagaaaactaatgtagggttctataatagctagtccctgtcaacctgacataagccagtaatctacgaagaagcaacctctgctgaaaaaaatctttccatcacagtgtcttggaagaatgtccgtgcagaatttttttggttcattattgacatgggaggacccagcacattgtgggtggtgccaccattgagtaggtagtcctccgttgtattaaaaaaaagcaggttgagcaagccatggagagaaaacaagcctgaatgcagcatttcttcatagcctcagtatcagttactgcctctaggttcctgccttgagttcttattctgccttccctcagggatggggcatgaactgtaagctaagcaaactcttcgttctccaagttgcttttggtcattgtgttatcatagcaacagaaaagcacattaggacaggcttggtactttccaggaagccttctttgatcttctttcaaatctcactaataattattaagtgctgctaataactgattagtgctgttgtgcattgtagaaaattcaagcacttcacataaggagtctctttgaaactgtcaagtatggcaaggtagggacttctgttttgcctcgggacatatgactcttagcaaaagtcaggcacagggtgtggaagtagcttacttagaatttgaacctgtacctttctcaccgcgttatacaaatcttccttatcctccagatgtcttcattatgcattgtgagtcttttattacaagtaggcataatgactttgtgtgtgtgtgtgtgtgtgtgtgtgtgtgtatgcatatccatgtgtgtatgtgtatgtagatgccagaggtaaaccttaggtgtctttctttaagagccattggttttttttgagatagcttccttcactggcctggagttcaccaagcagatgaggctgtggctggcctatgaacaccagggttccacctgtctctacctcctcagcacaccagtggacctgactcttttttttaaatgtggatcttaaatattgaacttaggtcctgcttgtgtggcaggcgatctattggataagccccactcgcgttcccaagcacagctgttttacaattaaccctaaatgtttttctttttcttttataaactagaccagcctttcatctggctttcaaacttccaatatgcttcagacttacccggaatgctttaaaaaaaaaaatatatcaggctttgctccagccaatgaataggaaatttccagccagtgtctagggggtcactatttgttttagcagtctccttcagacacacactgtgagtaaaacacctgtaactgactacagatgactcaggtaccaggactgacttgtctctttgcttgtttgttttgtggttgttgttaaaaagaatctgtgcttgcatattaatatgctgattacaaaatgatagcgatacaattaaaagaacgaaggaaagatatcgcggttgccaagaaggaaagctttcttgggatgaattttgttgatcagcctctttggactgtttagagacacgacacctgacacaccctgtctagaccctcccccctggagcaaggcaagaagctggtggagaagtggcagaaagctctgctctgtctttaggaaaattagaagaattctctgggtctactaagaggagatagaatatttctttttcttcctattttccaagactgaggtcattttaactataaagatctgttctaaatgcgtttgcgttctcaaaagaggttagtagtcctagtttttgacttgaagtgttataggctttaaaattgcacttgatcttagccaaaaggccgagaagcgatacaattgcacgtttaatttatagtcatgagacaaatgtggatcctttcttttgtccaccaagatactttccggatactttctaagtacacttgagaagcacgatgttttcccttcccagggttagtatggatcaagaaatgcaggaacctggtaaagagcaagacatgcaaagataggagagttggagtgggtgaatcgcctgttccacctcagggctgtggtgggggggaggctggaaggtaagaaccagaggaaattggagaggctgagacagcagacaggcagagctcagcagtcatgctgcacgggtggccagggtgtcagcagaagggcagcccaaggtgatgaggaactagctgggggagaatggaatgcctcgtaccatactgttagggcatcagtgagggaccttggttgttgcagagtttggaacaattcctttctgtgaaagcaaaaacagtgttttcttaagaagatgaacaggacagcatcttgtaagaagatgaacaggacggcatcttgtaagggacatggcaggagagaaggagttaagtaggggtattcattagaaagcttctttcagaggtccttgcaggactttgagtcctgaggttttagatcaggatggtgaagtcctagagcagacatggagggacctgactggatagagagtgcctttgctaacagagaacagaaggacacacttacattagccgaggctgagcacacagggacctgtggatggagcccagggtctttagcctaggatcagagctccggaagggccgcatggccacttcaccctttgctgctggcagtgcatgtggctctacttcctcttttccttcccttcccttgcatctcatggcttccttactaggtccctcacaaggaagactgctccatgggaacattttgcttgggatagcaaaaggaattcttgctaatgaggtttatgttgtccagagtacaacctttggaaaattgtgccatgttagtagataacaaagcaatggggtagaggtgaaagtcctgtgatcaagtgaacttggaaaatgccacgagagacttgataggcttctttcttttcaaatggtagcaaatgcattaccttggggctggggagatggcttaatttggaatgtgctgatgtgaaaacttgacaaccccggatttgattcccaacacctcggtaaaaagctagccatggtgccagatgcctgtaatcccagctctggggaggctgagccaggatacctggagcttgctggtcagctagttctagtcaaatgagtgagttccagatccagtgactgtctcaaagacagggtggagagtgatgaagaaaaacagctaaaaactgacctctggtctctgcatgcacctgcctgcacatatgtgcacatgaacatgcatgaacatcatgatacacacacacacacacacacacacacacacacacacgagagagagagagagagagagagagagagagacagagacagagacacacagagagagacttatcatagagggtagattgtagtatgtcacaagcttcctgaaccatgggctctttttagaaggagcatcccaggggaagagaaatgcacagacacatggcaaaatcaggcactgggaaagacatcatagaaataagcctcttaatgctggaagtttgtatgtaatggaaagaaacaagaggctgggatttgggtctggaatgtacaatctgacaaccagaggcaagtcactgggttcctctcaacctctcaaccccagtgtctgtaggctttttttttcctttctttctaatattatatggatcctcaaggtcctttcaaggggtctgagatcatgtgtataggcagaagaaggagtgatctgtgatttttctgctctgtaataactggtatggaaacaggaaggagaggcaatggggacagtgacaagatgatgagcaagatgtggtttgagcccctgagctgattacatggttgggcccgacactgctggctggtgtggcagagacaaagggagtctgtagctcgttcccagacctctgtcacaccactgtgccatgtgctgcatgggcaacatcctcgatgctaagacaacgctcattcccaatgctcactcacactgtctcagttttttgaggtagatgctgtgtgatcctggttagatcagccttccggattgagggttcttcatctgcaaaaataaggagcttaattttgggtcagagttcctgatgttttgtaagaaagaactgtttttaaatagttccaagactttcattgaagatataaagggtatataggtatttttcttacttagtgccagcagtggaccctaagaatgttcttggttttctccttctttggtcttctcacctacttcaaatgtttattcctgacttaggtagttaattcatccacgtagggacagcctcagactcactagattgccaggctcaatcttgtgtctctttacatgcaatgcctatctttttatctccataggaaaccaaattgtttaggttcaacctttcttcatgaacaaacccttcttttggttttcccagttacaaaaaagtaaggatcgtgtttctgatctcctgtaggctaggagctcaggctctgggacttcctccttccctctcctgttgctagtcatggggccactctcaactatgcctacattattattattattattattattattattattattattattattatactctacattatttcttgtttctgatgctgtcactaccacaggtcaggttctatctggttattatgctctctgtctctcctttaaagtcattcacatgccacattcagccccacagagcttccccatagcctttgttcgaaccactcaggctgccggcattcacagccctgtccccaccttgactgttgaccgtcttccagctctctcagttacttacctgttcctggcttctaaccatccatttattgatcttctcagcccacattctgtctatccagatgctcccttctcagcctttcatcctattcttttttgcctaaccaagtcctaggaatatctcaaaaggtagcttaaacaatgccttccttctccatcaacaaaccctcaatcctgtctggtgcctctcaggagcaatcacaatatcacttaggtttcttggcaagtctttgaagataatagttttagaactaaaaccctaaatgtgacagttgtaaagacaatgaagtggggctctagcatagagaagcccgggaccatggtcttggctgggtcttactttcttccaaagtgcttttctttctcttaattcttgtgcttcaaatctgtattacaatatcttcaataaaacctaaaccctgttccatacagtcttggcctgacattctttgctgccatttactggaattgaggtccctaaaagatgaaaggaagtccttaggctgctagggatgacagcatagtgccttatcttcatgtctgtcactgctgatgtgtgcagagtttaatatccgagggatccactgcaaacctagttaattgtatgagttggttcttccttagcttcaaaatcaggaaagttgtaagccagcaggattacccatttgtgatctttgtgctacagggaagcagctttcggaagcagggccttgctctcccctcatgtcaacatgatgttgatgagagaggattctatttgtaaacagccctgcgcacaggacccctgatcctaaggcatgcttaataataagccctgccatgaaatgacagacatctagggcaaagttttagctgtttctcagagttggggagatttcagctgtatgctttgttaggaaaccaaaagatgaagaaagctgtctttagctacgaagcatctattcttannnnnnnnnnnnnnnnnnnnnnnnnnnnnnnnnnnnnnnnnnnnnnnnnnnnnnnnnnnnnnnnnnnnnnnnnnnnnnnnnnnnnnnnnnnnnnnnnnnnnnnnnnnnnnnnnnnnnnnnnnnnnnnnnnnnnnnnnnnnnnnnnnnnnnnnnnnnnnnnnnnnnnnnnnnnnnnnnnnnnnnnnnnnnnnnnnnnnnnnnnnnnnnnnnnnnnnnnnnnnnnnnnnnnacatacatatgtagagcattcctagaaaacaattcagaacagataagcaattgcatccagggcaaaggatgatagtctgaggtgcccatgagacttttcctcacgtgagatgctatatgggatcccttcaagtcctcaaggttcattaggaagatccacatgataaagttattttcataacagtgccaagacatctcttgctgtctccaccctttctttctgctgtgagtaccacagaggagctttccagaggttaactgacatgtgatactacaacaaattgaatccagaagcagatatgataatctagttatttttgatgaagccagatgtttgtgatatcaaaaatgtaaaacaatgttgttatttcataaagctccctgggaagaatttattttttttgtagcatttaatatttatgttaacataattgtcatccaggagtatataataaattttaaatgctccattttaatttataagttaagccattttagcagatagacttgaaatccccttgaggttctctgggatgtgtccagtcccatcagaacccggggtgcttgggatctcatggatggggctgctaagaaggaacaaaatgtgaatgaagcaaaactttgcaataaaatattacttttctttccccctcccctcaagggaaatctacaagcaacctgacatttggtgctcgtgctctagagcattctaaggctcgctgcttgacttctaaagaagctgaaataattgaggaggagcggggaccctctgtttccaaggactctgttctgcagagaatgttctgcaccctctgatgtaagtagtcactcgctggagctctgttgcacatgacattgaaagtcagggtggtgccatgttgaaaatcatctgtcttggttaaagttggacttacccatgccagcactcatgggaatgttgggtccctgggtgtgattactaatattacaatctcaataattgttataaggtgctctatttcaacaatactttgaagtgactcacaaaaaaaaaaatgatattaaggaccaccaaaactggggtctagagcagtaatccgaactccagttttagaagagtaaataacagcaatatgtatctcagagatgctgcagatttagatactgagtcaggatttgagtcataaagagaagcatgctacattgcagagattttttccaggagtttccccattggccggacttcacttctggtctccatgggccttctcgcttcacactttgggcaggtcagatctcaccagtgaatctaacagtgtggcagcttcacaaatctgggtcttttctagcctagggctcactgatatcagaatcatgtcccctttaagccggagctgtatctccaggacctagcataggggctggcatgtggaggatgctcactgaagatgctcaaggtcagagccttggtttagacctgactctgagactttcctattcaggaactcactgaactaagatgtatcatttcctttgtgcctgcatcttcacctggcatgtgaagactgctcagtggggattgccttagacttgcctgtgtcccacactgcctctggaatactgttgagtgttgaatgactgagcgaagcaggtggaactgtggaataagtgattcctgaatacggggaaaattcagtgccccttccttagaccccacccaaggaaatttcttctgttgcactatgtacacttttctgtttctgatcaagggaattcctcactattcgttgcctccttgtggtgatgtcatagtttaatgaagtctttttgcagattgctgcatgagtcttcctcctgctcgccttgtttgttgttgttgttgttgttgttgttgttgttgttttgttttgttttgttttgtttttctttcttcctttgataaactcttagctggagccttcacatgggatggatgttccagaatgagtaattcatagctatacttagccactaatcagaagttattgtgggctttctctattccattagatttgccagagttattcacctatgaatcattccacgctacgtttcaggggctctgactgtggtctcacttcttctcttccatctgaaatatctatttccaggagccattatttcaatatggaaggcatgtgcacagcccagtgacctgagacttggtttgggtcgtgtgtgtcgccccccacccccaatctcttccatggcattgtacctgggagctatctcaagttcattggttctttcaagcaaaagccttttttgtcaacaatccaagttattttgagctgccagaaacaataagagggctattattgtgtgtgtgtgtgtgtgtgtgtgtgtgtgtgtgtgtgtgtgtgttgggtgggggaggttgatgttggggagttgggatagaggagagggatagtgcaaaagttagaatcaggagaaaggacagagtcagaatggaagacatggggagaaagtgagcagactgaggaagagagaggagaggcgagaggaaggcaagctgaccagttctaccgtcatctcaaagactacagttctgaagcagttgaccacctctccctgggagctctcatatccactgtggaccaggctctgtgctatgcagcctatgctttaatcacataggcaagcagagcgctaggagtttaatcgcccaaagctgcagttaacttccgctgtcagaatccactgtaagactgtcaaaaagcaggtggccacacaggtcaagctccagatggcctatgaacaactctttttcctgcatgcttcagttgggatggtggtcacgtggtcacggtactcataagtaactgattaatgttaaggtctaagcagactgaaacagttgcgtcctttctggttgataacctggccaacgagaatttgtttttgggttttcaacctcagcttggttttccctcatgacttagatgaatctttcccttcattcatctgtggtgggtggcagtggtcccacgtgtcctggaagaaatgtgctcaaggacataaaggcagcactgcccaagatattggaagtggctgaaggctgaatagaatcaaacctgggagccatgtgctggctactgagtacttaatggctgaggtaaatgagacaccgtgatcttatggatggcaagttgtgtcaggattagtttagaaaaggcgggatttggataagtaactaattagggaggctccaccactgtcataagtctatatacttatagagtgatgggatggactagaaacagaggcaagcaaatctgtcagaggggaattgaagtaaaacatgaccaggttgacttagacatttctggatgaacagtcctccagcagtgctcccacagtgctcccaaacgcatcagcttgggacagatgtcagcgacgtaagcaaagcactggcgtctgggagtcagctctgttggtgctgagattcaagaactttgaatgatatttttacttttaatgaaacaggaacaaaggttattgaatgtctgaggcattcttgggattatggacgtgagtggaagggaaagaagtagacctatgttagtaagaggcaattccagctaagtattcatgggcaaaaacaagggagggagagagaaacagatacgagagagacagagagagacacagagagagacacagacagagacacacaaagaaagtcagactgagacagacagggagagggagagacagagagacaaacagagacagagagagacagagaaatggagagggagggaggaagagatagagacagagacagacagagtcagagagagggagagagaaagagagagagacagagagatacagagacagagagagagacacagagagagacagagagacagacacacacacagagaattgcatatgctcaggtgggtagtgacaatggcatctgattctggaatattttagaagaactgccctaaggcttaaaggcatggagctgcagctaaacgttggtgctaggaagaactcccaacatgtagaagggagggtgtgtgatcggttgttattgttggagttggcttaggccacaaggacccagagagacctggccgggcacgtgaggtggagaagagaggaaatagcagtctacttggagcagagggtgggtggaggagtggtggataaggttgcagaggagaaaagctgccagagggggcagagccctgactgctggctggggtaagacatctggatgccatgttggggactcagcatttgtgctgtctttgctctggtggggagggggacttcaactctagacacctttattcctggtgtctgttctgttgagtgaaggtagttctgaatgaggtttgagatatcataaaagtaaattttcaggagaaagagtatactgggggtgggggtgggggagccaaaaatatatgcacatgacatattttggactagtgttttctaagatttcaatctgttagttttgctttgatctttaagaaccacccacaaactctgttgctctcagagcagaacatgggctgctagcgagacatattgctttcatagtttcaactctcagtcttagaagttttcatatcatattgaatattttagctcccatttgtgggctgtggagagtaatgttaagtgtcccttgctggcaatgttcactgaattgctaccggagcctgaacctaatcttagtccctgcttccgaggcacagggctcctgtttccttccttcaaacagatggtagggaacgaactaagaaggaatttttaatggaagtatgtttgggctcgatgggcataggcatgactacttgagtttgatctccagaccttacagtggaaggagagcactgactccctaaagttaccctcttgttttcacaagtatgttgagatatgtgtatgccagcacacatgtgcatgcgtgtgtgtgtgcgtgcatgtgtgcacacacacagagacacccacaatcctttgcatgggctcattatcacctgtgttttccattggagaagcagtgttagcccccgcccacttctggtctggcctctgggtagccagattcagatgtttccttcttttaatttcctggggaaaatcccaccacctgtgtcttatttggggtttttgaactgtgagatgatggcacccacacttcctagaatagctgcatccatgggccaagtgtaccagactgcacacaacaatggaagacaggatttagggcaaggaacagcagaggcgctgggaccaggcatctgctccacaaacatacagctgagtccggaggttgtgggaggagaaggcagggccccactgactcactcgaggatgtgggcacgctggctgctctgatctgcaagtcgtgagggtcctagcctggcttttcttcaagaacaaaacttcaaaggaggtaggcataggatgaagcagagttccctagcacccaggaggttttgtgtgggattctgtgagaatctgctacagccctgggtgttcaaatctcctccctaccatttttccccctgtctccatagcttagcactcaaatgattctttgagaaggtagggtaggcacaaatggaaagccttttcttcacttcagttctagagtctggcttgtatcttgccaattctgggagattataggaatgatttagaacttgtatggaaaactacctgacctcttccagggagacctcagggaattccttaaaatatttaacttttcttatgtctactttagtgctaaagaagaagatttcatcctactgatcccatggtgttttatgctgtggcttattcatttataaaccttattatcattattattccactgaaaaaatactagacctttgctctcatgtaggtgctaaagactgtaggaaaacttgatttcatcacactgtgtaagaaagactggaagggaaagcagctaggagctgcgggtgcctagatggatagcccaatgagagagcaagggggcctgtagccaagcaatgccaagcagaagagagaggaagaggttttgccctcactggagagtaacttcactgactctgggaggaacgaggcacagcctactgtggctacagagcaagggacagtgattgcatccaggagaagatgatgcggaaagtacaggccactaggatcaagaaaacaccattaatctttggttgttgttgcaaaattgtgctttccaaagccttggtcaaggatgcagaagcctcaggatgagccctgggatgctgtcctaggaaatgcgcagtggaattccccttcataaatcctagaggctgggagggcctctgagaagaggaaagagctgcagcactgcctggaagacggcagaacatgggcacgcaaggagtagccaaggagcgagagatggagagatatttttcctttcttaatcatggggaatatttattaagtaataaaaacctattaaaatagaggttactttcattcaataaaatctctaattctttctgatcctaaaatcatatacttttgaatatattaagtaacaaaaagtagaaatcgaccagacaagatctatgagtgaccttaaaaagaatccatactgttcaagaaattttgttttatgaatgcaccaaggggttgctctaaaaggagctggctttatacacaaagaaacttattacaacattttgtatatataataaaggaatgttgtaaattgccgattttgaggtcaaaattttatatgtgtgtgaaaaacctgtcaatcagtgatgctctcttggagtgtgagataacacaagacagtctttgtatttttagatgaaataaaaatagaagttaacaaagttatacaaaaagtacaaaatcaatgcatacatatgcccaaatgttgatgttctactttagttccccattgacataatacaaaactacaagagaaagcaacttgtagaggaaggaatgtctttagcttacaggttagagttcatgactgagagaagccagggcaggagcacagggtagaaacccggaggcaggcgctgaagcagaagctacggagggatgctgcttgttgcagctccttgctttgtctctaggctcgtgttcagctagcatgtttgtacctcataggaccacctgctctgcagggacactgctcacaatgtgctgggctctccagcatcgattagcaatcaagatgtccccagatatcttcacaggccaatgtgatggaggtaattcctcaggtgaggacccctcttcttgggtgtgtcaagttgatcattaagagccaccatcacagtgaagtgtgtttgcttgcagactaaggctaagggtgcatctttggtcctttacataattaaactgtcataaatgtgcatgagatattttttatgtgagaaaaagaatacataaccttatataacatttgaagagggggagatgttatgaaagtatcttttttctatctagagggattacttaaaaatcctgagaattttcttccttttttatattctgagaattttttttttaagattnnnnnnnnnnnnnnnnnnnnaacaaagttatacaaaaagtacaaaatccaatgcatacatatgcccaaatgttgatgttctactttagttcccccattgacataatacaaaactaccaagagaaagcaacttgtagaggaaggaatgtctttagcttacaggttagagttcatgactgagagaagccagggcaggagcacagggtagaaacccggaggcaggcgctgaagcagaagccacggagggatgcgggtgtgcaagttgattagccccacacagtaagtgtttgcttgcagcaggctaagggtgcatctttggtcctttacataattaaactgtcataaatgtgcatgagatattttttatgtgagaaaaagaatacataaccttatataacatttgaagagggggagatgttatgaaagtatcttttttctctctagagggattacttaaaaatcctgagaattttcttccttttttatattctgagaattttttttttaagattctgaaacatcttccttgttgaaagttaagttctttacatgtatcaatccgaccctagctaaacaacaacaacaacaacaacaacaacaacaacaacaaaatgcagggtttgtatttgtgctccactcaaacctatgggatgctctgtgacttccatggaaaacaagttccacactgcttggcttgctgtccacactgggaactgactcccagggaatctcagttactgctgtgcattgtctttaagattcgctattcccaccatgcccagcttcccatattggaacttgcatttgctcctcgggacaccatgttccctgggcatgtgttaagcactataaagtgctccaatacttcttacatcatgaccaggttggcccatctgtgtgagctggcagatcagctccttctcagaccatgacacacaatgtgcctgtacatcagagactctgaggatactcagagttgcccaatagttttacagaagaacaagccttgtttctagcttccccatccatacctcctcacaggctatgactgccagaagtgacattttcctcacttccacctttcagatgccacaattcctgacccatgtcccatttccttcttgattcattcccagtggtttcaattaacagtggccatgtatggaattttgaccactcaaatagactgttttctttttcttttaaattaaaaccatagcacatgccaagaatataacagacaatataactgggatttagaattcaacaccaatgggtagaaggacttaattaaatggtcttttagacagagatgcaatgtctctaagtctctcatcttattagcaacacagaaggactatgactttcttgtttgtctttctggaaccaagtactgtgcaaaacacatggtggacattccttaagtgtttgtaagatgaatagatgagcatcaaaggagggcagctttgctggcacagggctagtgtggactactgaaagggttcagtaccacagtggactgggtgatgggaaatggctcagacttaatcaccatgtacttagttcttccagctctttaaaagcatgtgaatgtgtgtgtgtgtgtgtgtgtgtgtgtgtgtgtgtgtgtatgcacgagcatggaggagaagactgggcatataagaatataagagtgcttccctttggatgatacacacttgcaagtccagatacttctactgtggagtaggaggctgaggaggagggatcccaagtttaaggcctgtgtggactatagagtaagttcaagaccaacctggatacacttgtgagtccctttttcagaataaaaagtgaaaggaagaccagggatatagctcaatggtcgagtgcttgtctagcttgcatgacaacctgtctgaatcctcaatcttgtcaaaaacacttttgccttaaggagactggatatatcctctgatacatgtcgagatctgacacttacaaagtatttcacttcctttagggttttgttattcttgttaaaatccccccacccccaagtcactgtcatactaaccttagcctaccacttaaaaattatataatgtgaactcccttccttggcatctcttctaatgctgcttgccttaaccttacagctccttgcgtgtccccaaagacacaaagattatagcaatgtgtgcatatgctattttaagaatagaaccatctctgcctctctttccctttccaaaccaactattgcttgaatgaaaaaaaattccatattgttgaagcaaaccattatttatcacctgtcaccatcaactggtgatttgtgattgcaaacatcattctgtgacctccttatgcacgtacacccataagccttggggaagagctgactttgttaacaagttatttgagttattctcctgactcataaacacaccatggggaaggagggcagagattgttacttcagttccagatgaagaaaacacagtaaacgcatgggaggagtagcctgcttgagacacaagcagactcacagctcaattgtaccagatccagatttcctgatcatttaaactgtggctggctcagagctcctttgatcccactccaacaaaaccacgagagatgttattgaataaatccaaaaccatgaggagaggggtgtaagcagactcttgcattgcaacctcctaccccaatctcaagaccaaattcatttgaaaggtatagttaggagcaaatacattaatggtgagaggggccagcagtggtaatgattgtcctgcaacggactatcccttttgcaatgtctccaatatggctcccaaagagtgtgggcgtggcttaggttgcctagcagcaggagatgtgcatactaaggaagccactcctctcaccctggagggaagtaggtatctgattaggatcagtcttaagggcaattctcaactggaagtaccagctttgtgattaaaattcacaggtgcattgagctgtcactcactcagagcataggagggaggctgggcaaaaggagaagaatgtggtgggaaaatcttagggagcctggggtgggactagggatgtgggtgagtcacgttccttgggtacagatgtaaagatgttaagaggaaaaaaaaaatcagaaaccaagataaacactactttaaatcaacatttagtgtatatcagtatatcatttggcagctaacaggctatggccaaaagcctctttgtaagtaagagtttacgaaaagtcaatagcagaagagccaagcttatgccctggtattaaaaatcctgaattaagcccagaatgtcagactcatgaaaccttagcctgagatctatgagaaaatatttctgaaggaaaagaacaatggatttgactgtttctgttatttagttgtttagagattctataacgagtgaccagaagctgagtgtttgaggaaacttacagcctcacaaatctggagaaaatgcaataccaagctgcggagcagagccaaggttgttctgtagatttcagggaggtagcccatctccaccctccggcttctcgtgcttcctgaacccatgcagttttacctgtgtggtcacctagcctcctccctgtggttgcctgtgtttgtttgtttgtttgtttgttttttctcataaagatccattggatgatatctactccagaaggtgaaaagtcagaacatctaccatgtccctgtttgcatggtaggtcctacaggcaggcagagtcaggactcgaacaaatctttcttgaggtacaaggcgcacctcaaccagctcgctattaggcagggacatttcacttcaaacttggcttgcaggagtggtgatggattggggaaacagacctttcataatttaaattcctaacgaaatgaaaggtaggtccattggggtgcttacattccagtctcgataattgacagcaacaggcctatgattctattagaagatctgatttccagtactcagctgataatgatcgggaaatgtttatactaaattatacatttcttttgttaacttttccctttgagtacaagcaatttattaaattattttgattactaccaagtgtaataaatttcagatttaaaaaaaatgtaaactcaccagctggggcaaaaatgtcctctgtcaaatctggtgctctgatttttagttacagcatgtggctgttgcacctgggaggctggttaaagcttctagaaacagtttgctttctttaagtggttcacgttcttcctgtaacctcatttatataaatgatttgctttctaaaaatttttttatagtggaaaggtaaaattgaattcagcttagcttaattcagattttttcttactgcatactaaaaataagcagaatctcaataaatatataatttggaaagttatttaggggactaaaatgttctagaatttggattaggtggatgcaggatattttgggtttcccattgtgggtgagaatttaaatttacttacatgcccaatatttatctactagtgttaagtctgaacttgtctagcgacagggaaatgaatggagttaactgagggtcttcagctctgagattcctataagagcccaaggtgatagaatcaaagaggaaagtatccatgacatttgaaagaaaagattatgtatttgttcttaaactataaacaaaacttatcattttctccaattaatagaaatcaaagacatttcataccatgttgtactattgtcactctttcaggaagcactcactggtgtttaaaacttgtagttttaggtccttgactggatcttgttaaatgggctacccacatcttgcccgtacagggcacatttctgatttttttttgatgattgcatttcggtttagttgattttctttgtagtctcatactctttgtgtatttaaccatattgttcctagcaagggttctaggtcttcattagactgcaagaagtgatcatggtagtctttagcttccagaagctccttagaaagggatggggtctcatgagcaccccttgtccatgatggtgttggaaggcacatgcgtgggttttgtgacagtactcatggctgctgtgtgcacatgactgtaaccttcatgtcctatccagacgagtgttccccaacactgctccgcatcctctgccacacacagtctgtcctcctcttccacaatgttcctcaattgagggggtgatgtgaatgccctgtttggggctctgcaaagagtatttttaatgaaacatattcatttctgtcttcttgcaaggttcctctccagggcaccgacctaacaaagtatgattgctttgtcagcccacaatcagtgcagaggcaggtcgtacctccgttcctggttcctttttttttttccataaaattagtaattccccattgttccttctcaggcctttatcgtatctccagaagattccgttccaacagtcttctgtatgtgctaaggcacatgagtgctattgtgaagtcaaccttacacgtctgcaatgaggatgtctgcaatgtggagttctgctgaagctccggtttcaaacagataatcatgaaagctaattatgtcatactttgtaactgttgctgttcttcttaattttcccacatttaaaactattagaattttggttagtaccttctgcattcattttcttattgctataaccaaatgcctcttaaggaaccactaaagagacggttattttaccttatggtttgagggaatagagtctattaaggagtagaaggtatgtgagcatgtggccctgtggcctctggtcaccttgcttttatactcaagaagcagggagtgggcaggaaatggagctgggctaccaaacctccaggtcttcccctgaagagatttgcttgctctagcaagactccacctctgaaaagtcccttaactttccacaatagctgaggaccaagtgttcaaacacgtgagcctgaagggggccttcacatctaagacacagctccctcgagtttgtagcttctaaaacagactctctctgtgaatgaaaagcatctgctttgaggcatatcttctccaccccatctgtgaaggtgaatggaaagaacgtacttagttgtgcatggttggagtcagatcatcaaagatgtgagctagacttagtagcaccggaaggaaagaagaaagtttataaggtgccctctctgtgcccttctgtatccttccaaggtttctaacctacttcccggaagtccttgtgcttgagggctgctcttgactttcttgcttagaagcttgctgttctcatactacattctctctctctctctctctctctctctctctctctctctctctctctccctttcctctgtctctctgtttctcttcctgtctcttcttccctcccttcctccttccttttcgttctctctgtctctctctgtccctctgtttgtctttgtctttgtctttgtctttgtctttgtctttgtctttgtctttgtctttgtctttgtctttgtctctgtctgtctgtctgtctgtctctctctctctctctctcacacacacacacacacacacacacacacacacacacaaatcccttactaggacatttttggatcttagttaatcccagatgtagtcaagtcgacaaccaagaatagccatcacaaccaccaccaacttggctaacacagattggaagacttcaaaggatagtggccgaagtcagctcggccgatgcctctgactctggttgctttagacaggagcaaacttctggctgcttcagttatcggttgatagtggctcctatgattaggaaggataagtggcttctctcggctttgccagaaccaagtggtcatgttcgcggaggagtgggaacactaatttcagggatttgactctggtacaaagcccgagggtgcgatgttgctctttccttcggccctagtaaacatcttatgctcggtatggtggttgaattgctggattgagtcttcggtttcagtgccaggaggttcacagtaaatgagaggtgtgggctcttggggaagagtggctgtggcctggcctcctgtctgcaccctgtcaataaacacacacacacacacacacacacacacattctgcaatgcaggtgtgcatcacagggaggggttttctagagctttgagagctgctaggagaaacgggccgaggtgtgggtccagggaggcaggaggtctggagaaatagaacagagccgagaatgaccttttagctcctaccatcccataatcccagctttcccacttctgcccttatttgtgccataatcaggacacattaatttagttccaggccaggtacacgcagggctgttcaagtttggtagtgaactagacacacatgaattttacctttcatttttttttaacctgatggattttaactttattccataatttattaccaaagacaattccacatagtttatatttttctaacagtggcaacctatctattacatcaatgtttattttttagcacagaacaatcaacatttaaacatttcgacattataagatgaggaattttacctttcatagcttaactgtggagcaatttgaatgaatagcagctgatcaaatcattagcacctgctcagtgtggggctgtgacagaggaagtggggagtggcctagggggggtccatccctgtgaccaactgccaatacttgtcctactctgaagtcagatcttttaagcatcctcttttcttcctctaagtctccttccttgcgcttctcatgctgccccagatttccggctcttcttttcgaagacctctctcacagatcagcccctctgactttatagtccccttaggcgcttgtcttggcagctgctggctggacacctgtgtcaaaggtagatcggtgaagcacgcactctccattgtatcccaccttccttttctgcctctgacaggtttatctgccttgtcaccctagttgtaggctttgtggtgtttggcttcccatttctgccatccatgttacacagtcacctccttcattcgtacctgccctgtgccgcttctctctcttgctgttcatgtctcaccagtaacattttgggggatctaggacactctgcgcagccgcagttgcagtgccgttctccccgcggttctctgttactctgcggctgtttctggtctctttagctcaggggattctccttcggaacctccagagctcacgatttttgtcttcagagcttgtctctctgtcactagtaactttccagcggattgttgctgagctctgcatgtagacatctggtttctaaacccggcactgcctgcctaactcctggttcacctgggcatgttcttaatcacgtgtgctgtggtcattctatctgtgaactcaccgtgttcctctcatagagcggtggcggggatgaaatgagtcagcgcatgtgcagtaaaaagtgtctgacatcacagcattccgtggtgcacttcctatttgtcttagggcttctagtgcagtgatatagcagcgtgaccaaaggaaactggaggagcaaagggggttatttcactttgtgtttccacattacagcccatcatcaaaggaaggcagagcaggaacccaaggcatcctaggatcctggagtcaggaactgaaggccatggaaggatgctgattactggcttgctttccgtgtggctcatcctgctttcttataccaggaccacgggcccagaaatggccccattcacagtgggatgtgtctcttcaatccttaatccagaaaatgccccacagacttgcctacagacagtctgttggaggcgttttctcagctggggttcttctttccagaggactctaacttgtgtcaagttgacaagaaaactagctcagacactgctaacaccttgcgtttttgcttttatgactgattactcagtatatttctgaatcgtttatagcattgctcataaaatagttttctggatccacatcatatcgctgactatgcttcttgcgacaaccaaatacctgcccgaaagcaccttaagtgaggtgaggattatcttgatcatggcttaagggaatccagtccttcagtggtaaggaaggagtgctggcaggtggctcgggtggtggcagctgcttgattccatcccatcagggctgttggcagaactggagcgggaagtaagggccaggctagaaacctcaaggcccactctctcagaggcccacttccaaggctaacccccatccctcataggttgtaagccctccccaaacaatgtcatcagttggtgtccaattgttcaaacatacaagcccaagggggggacatttcatatataaaccacaggnnnnnnnnnnnnnnnnnnnntttagccttctggcttgctaggcgtatagagtcaagatgtcctcagtaaggttaattttgttttgctaatatgctccgcacaaagcaggggtctcagttaggggcagaagagagctccttggctggacaggaagtggtagatgagagccagaaggaaacagcatggttgtcaggctttgggtttctttggctctccagctgccactgtcttgttatgtttagtaaaatgtgaggtttgtgttgtctctaggaggacagatgtacacttttctgatgtcctttaatgctgggtgtggcaagggaaatggagacaaggtattatctgaaccaggaaccctggcaaaactctgctctcccgagtgtgcccagtggccttatcttgagcaacagttggggccaccatggcagtaaaatggtcctactgctttgcattgtctctcctggcttctggaaggcctgtgctgctttttagatgtattctcataaggtgctgagaacttgcttgttagtcaccaaagtgactgtggcagattaggaatgtgtggagggtgccccaagtctttatttatttatttttagttctatatcatgatcatcttcatcatcatcatcaccactttggtatgtgtgtagcgcatgcatgtatatgaaggtatgtttgtgcaggtacgcatgcccacacatgtacccaaggataccagaggttgatattcgatattttcctcagttgctctccaacttattttatttcttgagacagattacctcactgaacctgcagtttactctttgggctagactgactggccagtgagccctccaccctcatcctcctgtgttccctcccagggctggccttaaagatgggtaccattgagacctgtgctctgttatgactgagatctctggtggagatgaggcagatggctggagaccagaaccagtggagtgtgcctaacccatcatgggggatgagagtgggttttgtattttgagacctccttcagcagttagggcctgagaactgaatctcaggatggaaagggaggagtcagagtagccccgtaagtattaatgggccggcactgtgtaacactctcgtgggtgcccttcctgtggttagggtaatcagctttagctaaccatctggtgttttcattcacagtcttttggaactgcaacccagtgtgcgtgtttccagggcgactcagttcaatggggggtnnnnnnnnnnnnnnnnnnnnaccttgcgtttttgcttttatgaccgattactcagtatatttctgaatcgtttatagcattgctcataaaatagttttctggatccacatcatatcgatgactatgcttcttgtgacaaccaaatacctgcccgaaagcaccttaagtgaggtgaggattatcttgatcatggcttaagggaatccagtccttcagtggtaaggaaggagtgctggcaggtggctctgtggtggcagctgcttgattccatcccatcagggctgttggcagaactggagcaggaagtaagggccaggctagaaacctcaaggcccactctctcagaggcccacttccaaggctaacccccatccctcataggttgtaagccctccccaaacaatgtcatcagttggtgtccaattgttcaaacatacaagcccaagggggggacatttcatatataaaccacaggatttgtctttctccagtcacatacacacaaacacacacattatgcacgtgtgctatttatatgctaaacacacacattatttgtttgtaggctttagtttttaatcagatcgacattttgatgatgtttctaaataaaagatttagacaagtctccagccagtctattattatgatgagatatgaactgcttttagcttttacttagtgtgtaagtgaatacacagcatgcatgccatgacacaggagtgtaggccagatgacaacctttggtgtcagcctttgagctcgatcctcttgagacaaggtcttttctgctgtttctcatgacatacccaggactagctggctccaagttctaggaatttccatctttgtcttccatcttgcagcaagaactcaaggacaaagggggctgtggcccgctggcgcctcgtgggttctggaggattctagtgtaggttctcactcctcttgctcagcaagaactttacccattgagccatgcccccagcccaagatcccctccaccagtgtgtgcttattcttatgaaggtgtgccgtgctgactggtttatgtgaaagtttgaagtgggcctgatctcagggcctctctgtcctgtgaaatgagcacactcggagacatgtaaacctcagagatgagctcatgggagcgatttctgcaatgaaaatagtgatgtgagggtgtgccagggacttcaggttcacagagtataattagaacttttttcaaatcactgcccactgtaatttcattgttatgtatattctttaattatgggctctaatagtccagtttagttctgtaattaggtataaggacattaatttcagagacataacaattggctcaaatgtacttctaaattctttcccatatcctaccttacaaggaaaattaatgcgccataaaattttgtgcaggaaaagagcttcccagagggcagcttcgaggagcctgggggcttgggttcagggaagacatgagactcttaccttggctccatttccctattgaatgtttgtctcatttctgataggccaagtcgagactatggtggacagagaagaacccctcaattcacattgaatctgtatcccttaactggaaaacttagtgacatcaaagcctgatgagtcccggggaaaggaaagaacagttagggcaactgtgcccatatacaaataaaaatcatgccggcctcatgaagctgaatgcaccatttttttcagcaagttccaagggaaacaagtgggcctgtttcatcttctacagtgtcttcatgtgtacccattgaccccattcgtaactctgcccttctcagcctccagtgaccccttttaaactctacaacaaactccttatttaaagcttccacccaggaaggggaaagtgcagtctttgtgcctgacttctttttattaatgtcttccagttctagctaggctaccttgaataacagggttccatccctatcatggaagagtattttattgcatgtatgtcctacattttctttatccatcttttcatcagtggacattggggctccatttcttagcctttggggtgcaatccattggagggtgtatagtgtctgaacacactggtttccttttttaagttttgttttctttgtataggtacccagtagagggatagatagctcaatcatgtggtagttctggttttagttttttgaggaacttctgtgatgtttccataagttatcagttcttatgaacacataatttataatataggctttaatatataacatataaatataggttagagtttaagctctgcttctgctacttactagtctaaaggtcaacgactgcagggcgctacacagaggtgatttttatttgctaattacattgcagtgaggattcataaatctactgtcagtgtcagaaaccctcaaaactcatttcttctctatgatcaacttagctgtgagagacaacgaacacccaagcatgttatcgtgtgtgctgtcgtagaaggaatgctgcttcctcaacaagaacatactagaagattctcatgactaaagggtcatgctgggcgctggacacacagagttcatagggtggtagagacaggcaggtagatcagtgagtggaagaccggaaccagagtctgacaccgcacttaaccacaggctaagtgttatcatgggaaacatttggtcagttctccagggaccatgatgatacatgagaatgttggccatgtcactgtgtacaggaaggtttctctctgtgtgtgcatgagtgtatacttgtgtgtgtgcacacgtgtatgtgtatatatgcatgttcatgcatctctgtgtgtgtgtgtgtatacatatctaacttgggaatatggggacatgcatgtgcacagcaggcatgaatgaaagtcagaagacaatctcaggtgtcagtcctcaggtgactcccattttttgttcgagacaaggtctgtcactggcctgggatttcaatgtgtaggctaggctaactggcccctgagcttctggagatctgcctgtttctgtctcccatttcactgtttctaggattgctagtatctaccaccatacttgtctttttatatgggtttaaggaatccagactcaggtccctgatcttgtgaggggtcatctccacagcttgagcccctggtaagcttactaggcaaaatgagagatgagcaaaaacccacagcctggagatgactggtggctttaaggaaccgcatcttccaggtctgttgactcatcaatggatatgtgggttatttccatttgcactggaaagcataagccaggccaaaggcttgcacactaggcacctagctgatatccatttaataaacagataaaaagggctgaaagaaagttaggatgttggaaggagtggnnnnnnnnnnnnnnnnnnnnctaaggctgcgtgtcaaagtctgtgccgctaccatttatgtccttaggcttccattcccatgatgcatcattcttagttctctgtttcctgcctaagttgacaagtccatgcatttctctttggaagtcaaagggcaccatactggttacaagggggactgcttcctctgtgcacaagggtttttcagtcaacctcacagagcaaaccaaaaccattatccgagaatcatgtctagtttgggtttgatccagccctggataatgtcagctgggcccaggggcacatgggaatgataatatctcacttgagacccattatggagactgagactctcctcccttaaactagtgcctttctcttttgttccccaagagttcagacaggatactttctatgcccggggaagccacgtgcaattatgactattacagggggggggggacttcaaatatgtctagacttcattcctttcagctccgtgttcactacgatggcaaatttaaacaaaagagcatggaccctccctctccagattgccttgcccaaggctaacattcaatgaataatttatttgttgaaggatcttagctgactgctcaaggcttaaataaacctcatgaatacatctcggttgatgtttttgggctcttggtgtcttctcccagtgggattctcacattcatgggcagcctaggagaaagaggaaaccctgaggatcctgttctacatgtcatatttctccccatctgacttgccaccagtctccaagttagatgattcatccacaaagtctttatttaacatcctggaactgaacagtacctccctaggagccttcaacctcatcaaccatcatcatcatcatcatcatcatctttcagcagcagcagcagcaagaatatggggctcagccctcttagagaagcctttgttaccagtgaactgtggtgaatgcagaaattcatgactgtataagctgctacaaatggtcagccataaacaagattcttatattatcccctttaagaccaagggagcactgcagaagaagggagaggggatgggaagaatataagagctagaggacaggaagagagaccatgaaataccagcttcaggcaataaactctaaataattccaggtgaccacatggggtctgcacaagaacagacccatcatcagctcagtgtatatggaggtggggcttgagaagtcctacctgtcactaaggaatctatttcctaccaacagactccaggaaaggagacgtcattaccgtcactgtgtgccaacatatgacattaccaggttccaatggagaattccaatcaaatggaaatgtagatggctctctggtcaaagcaaatgggacataaaacagaatcaaaggtcatgaatctgtcaaaggggccagtagggaggaggcggcgatggatgggtgataagagagggtaagggaggtttggtaacacaagtgcagtatagacatgtgtgaaactgtcaaagacctaactaaactaaggaaactcttggggtacagatttcagttctctagcggctctcttgctttttgagactccccctgtgctcaatatgaacttcaccggctcaccttttagctttcatacgtatttgaaatacaactattcatagtgcctggtgatttatatggtttctatacctaataagtcggtgcctctctaggctcacgggtttaaacactttatccccagttagtgggactatttggaaaagagttgacagtgtggccctggtgaagaaggcttgtccttgggagtgggcttcgaggtttcaaaagagaggttcccaaagacttctacaatttccagtgtgctctccccacctgctctgcctcctactttcaaatcaagatgtgagttctcagctgtccctttgctctaccatctaggactctaagcttccctttctacctccagttcctggaatgacaactctgagactaattatttactgttaaatgcctaggccataagctttggctcattccctgactaactcgtaacctatttaacctattcaaactattataactttaccatttgcttagttacctctccttcagtcctgcctgcttccttcttcatgtctcttctgcgtctctctctcagcatctccctgacttcacctacttgctggtttatgttcatctcctaggtctgtctctcctgtcctcacctgaatctcccgtttagactctcattatttcccagaatcttctcttttcctgccagtgtcacacctcctatttcctgccgcagctcattggccatcaactttttaattgacaggtggtgcttataggagattctctctacactaaccctccgaaactaagcctagctaaacgctttcttgcataagttgccttggttatggtgtttatcacaggaaaagaaaaagaaaccaatatggtgcctgaacaaagacttaaaagatcattcaaaggaaaccataaagccatgaagaatttgggtaacttgtaaggaagaggaggaataaaattggtgaacccccaaatcagtatatgtcactttggggagagacacagccatgtggacaggtctttctaaaaatcatggctctggagccagactagctgacagtcatgtgatttgggtcaagtaaacaacttctctgaccatagtttatttatgtgtaaatcagggatcttaagacccctgtcttagggctgctgtattaagtgaggccttgcatgtagaatgctaagaatagtacacggcacactgtaaactctttcaaatgggctattgttagcactgagatgctgcagtgctgagtgttcctgtgccagcaccctgctaataaatcctctgagtttattgctaaaaactgagccttgcagaactttgaactgggaggaagcggagagatagttttgtttactcctctttcctagatgaagaaacatgggcctagggtcacagagtaggtcgctgaagaattcaaaaatagtctctgtcgattgcctgggacacctttcttctcacaaaaaaacacacatccagagcctgtggccagtcttctagaggtctagcattcccctaaagacacctcctcacctacgagacacttttggctaaaactctacagcgttgaatcatgcccaaagaccagctaggtggggagactgtctcctgttctccaggctgggctgggtgcagagcaagggcatcttgaggtaacccgggcagaaggagaaacatgcgtatttgccggaacacacatggacagtgtttaaagacaggagtgtggacatgtttctcttaggctggttcttacagggctgagatgtgtcagagtgacttgtatcagcccattgctgatggctttattcactttcaatggcctcagtggccttaggcacattcatatgggatgccacacagaccaatgaacttgtttacaaaaatgtgtacaaacaaacccaaacctagagaaggctttactggtggcaggggaagattttgctcacagccaggaaacccgatgcatctagtcatcttctcttaacacactgtgtttgcaaaattgagaccaagaaggcaagatatttcaaaggaaactcaaggtcacccggggacttgttgactaacctcccggaagtgattgagtcttttcgagggacggagtcttgtgttcttcccaagtctgcatctgtttgcttttgtgattgaggatggaaggatgaggagaccagaacactgtctgcagccaagaggtccagactgaaaccagaactcacatctgggctctgcgtcccctcttgctgggtgaccttgctgtcttaaccttcctggatctggtatcgaaggactgcctatctgctcgcttaatgtgcaatctgtgctcagggaaatgttcacaagggtcagatgtcactatatgaattttgtttgtgatgtgggacagatttctatgctgtgagcagactgagtgtctggctgagtttcctcatgtgtaccaccaggtcctgcctctaccctctaatgatggacatcactttccagaccattctgaccttctctctttcacgagtttggttgctcaggcttatgcaaagactgtgttcatgaagatggaatggtaggatagcattttcctttggctttgttgttataacaaacgacctagatttgtagccaactgacaacagaaatacatttttttccccatttctggtggtatcagtcctagattgaagtgccaggggacttgatatctagtgagatcccaccttgcctcctggttgaagatacagagccctcaaccaggaagaaggtctccggtttcccgttttaatcttattcagcggggctttgcccctgtgcccctcattgttttcagaaggctgcagctccagtatcttctgttgcagatgtgcttcgagagtgtgaacttgggaagggataaacactggagtgaagtacgcgtgggtagcacgggtctgctttcagcagaggagagccatgaattgtatgcggacctccgtgcctctcctctgcgtcatcttaagagctgcttcatttcaagggaggaaaggttaattttgggtcctcttgaaacatgcaggcaatgcctgccaaatccaggatagcttagagccacaacctcatgaggggcctggttgggtctgtgtgtctgctttggatcagccccaaggccttgccctgattcctgtgtgagctcctccctcctctttcctggagaaatccacagcgaggcagtgaggcgagggggccagtgtttattttggcctctctggagctggactctgctgctctgtttgcctaggatgaagtttggtccctcctttttttatttggccagagactcaacctcaatcatttggtccgttggtgattttagaccagatgttcaggctctttgggacagggagaagggcacaggtattactcctgctcaaacctactaggaataccaggtagttatcctaaaatccatggctgcaggcactgtcaggcctggagaatggaccttcatttttctttgaagtggggctggagctcagtaagcaggtggacctatctgggcagcatatgcctagctcaagcctgcttgctggctgtcttgggctggccaagtgactagatgtaagcaagggctctggagccagtctaggctaagggttcactgcttcctggatgttaaacttgaaaatgattttagttctctgaatctcagtttcccttatgaaatgattgtattttgacgatttgatttgaaggattaaatacactaatatgtaaaactgaaagacatgaaatttgctttcacttataagatggcaaaggttaatagaatgctttaaaaatgtgatccagctacgtgttgtatatgagaaaagtctttgagctataaggttacaggtatgttggacaaaaaggaatgttttgaatcatataggtattaattaaaagtcttcaataaatattagcaaattgaatgtagaaagagattgaacacattcagagtgttcattccaagcatacaatattggctaaatataaaaattatatgaccttcttaaatgattcacaaaataatttgccagaagtcaaaaatcaatcattggaacattcaatgaaatctctccttaagtaaagagtagaggacaattacttgataaagagcggctacaaaagtctacagctcactttgcatatggaaatggtgctttcttcctaacactggagtacaaagacacctgcctgtgttttctttccaacacagtaccaaaagttctaggcattataaacacaagtaaagatctatgaagtaccccactgcttgagctgctaatgtgctcagaaagctaaaaaaatcaatcgtaagtctatgtctctggtgagtctaagtcacttgacattttctgactcaacttctcttctaccagaagaagccccaccctcttccttcatcctttaagagtaaagaactctgcacaccaaaacacttaatatgttgagcaaatggggctgtgccaatataggggaatgccagggccagggagcaggagtaggtgggttgtggagcagggggcggggggaggagataggggatttttctgagaggaaactaggaaaggagataacatttgaaatgtaaataaagaaaatatctaattaaaaaaaatctagcttttccccccaaaggttaactgatttactgactgtcattctaaggaagaactttattggaaacgcttttgtagaactactcattgtttttaaacctgtgcttagaaattagctgctttgtgttggggagagtttgaagaaggagatgggggtatacaaattgtattttattatatatatgtgaaattctcaaccttaaagaaaaataaacaaaaaaagagaaaatattcaattttaattcagtctaaatttagactgctaatcaattaaattaaaatttcgtgccaaaaaaaagagagagaaaagaaaagaaaagaaatgaaaagaaaagaaaagagaaaaaaggaaaagaaaagaaaaagaaaatggggctgtgtaaatcttctgaagtcagatgccaaggacgttggcatacattttcatttcttttttcctggctgatagtggcaaatcttctactgtccttcttgaagagcatggaccatggggtttaattttagagagctgccttgagaattcctgaagactcaaagttcatggcttggctaggtaacttctgagaatgtttggaaacaagagagtttatagcaatttaagggaggctcaaagatgcttgtttctgcttgtgtgggcaggaagatcttgaagtgatccaaaacaaccagccaatcatgtaagatgtcgacaaagataacgacatgtaaattcatagtatgtgagcccttaagatcttcaaaaaccacaaaggaatatggaacacacacacacacacacacacacacacacacacacacacacacacacacacacacacacagctagctccctcagcaccagtgctatcttctgaggctactgtaataaatacttatggttaagatcaagcgaggaaacttgaagcttaaagctacagcaatctctaaatcctcaactaggtcacactcacgaggcactatagcaaagtggttagaagtatggatttctgctggagtttagatcctactttcacctttgttagtgccgtccttgacctgttgtttaactgtttcctgctttggtttttggcctcaatatcattatgttaactgtaatatctatctcataggattgctgggggaaatctaaagaagtcagctatactcagcttttatgcatgaagcagaggggatatatgaatgcaatctaatctatttgtatgatgtatggcgggggtgggtgacttttgcttttaagtactgtcttcataaatcatgtcatgatgctactgtgacggtgcccatcccccttcttttagtcactgaaacgtaagtatgtctcagggccaattaacagaatgatttataatccattagattcgtggggcacttcaggccttgggtctcctcccagggctcctagtaacaaggtgtacagttatagatccgtgaactggtgtccccgaaccccattcccatctacatattgaggaagttaacgggtgcctgctgaggtcctttgtttcctagaaggcagcatacttctgaggtggagaagcagttttactgacagggacaccgttgggatctcctaggaacaaagtgtcctctgagaacatttcagcagtggacagttttctaagccctttccattaatgaaccattggagcaaatggtgatgaaggcacatccccatcctcacttaggaataagggaaactgaggcagacagaagctgagttgcccaaggttccctgatattaaatggcaaaactgggatttggtgtaccagaaatcctgttctggaacagacgggtaagcaaagtgacgggtaaacaaatcaaagggccaggtcctaactgctgcgtttcctctatggtcctgtgctatccatagctctgctaggtactcagctgacacttagcatcctcaatgatcatagacatgtgtttagctaaactgattttagccttctggcttgctaggcgtatagagtcaagatgtcctcagtaaggttaattttgttttgctaatatcctccgcacaaagcaggggtctcagttaggggcagaagagagctccttggctggacaggaagtggtagatgagagccagaaggaaacagcatggttgtcaggctttgggtttctttggctctccagctgccactgtcttgttatgtttagtaaaatgtgaggtttgtgtcgtctctaggaggacagacgtacacttttctgatgtcctttaatgctgggtgtggcaggggaaatggagacaaggtattatctgaaccaggaaccctggcaaaactctgctctcccgagtgtgcccagtggccttatcttgagcaacagttggggccaccatggcagccaatgctttgcattgtctctcctggcttctggaaggcctgtgctgctttttagatgtattctcataaggtgctgagaacttgcttgttagtcaccaaagtgactgtggcagattaggaatgtgtggagggtaccccaagtctttatttatttatttttagttctatatcatcatcatcatcatcatcatcaccactttggtatgtgtgtatcgaatgcatgtatatgaaggtatgtttgtgcaggtacgcatgcccacacatgtacccaaggataccagaggttgatgttcgatattttcctcagttgttctccaacttattttatttcttgagacagattatctcactgaacctgcagtttactctttgggctagactgactggccagtgagccctccaccctcatcctcctgtgttctctcccagggctggccttaaagatgggtaccattgagacctgtgctctgttatgactgagatctctggtggagatgaggcagatggctggagaccagaaccagtggagtgtgcctaacccatcatgggggatgagagtgggttttgtattttgagacctccttcagcagttagggcctgagaactgaatctcaggatggaaagggaggagtcagagtagccccgtaagtattaatgggccggcactgtgtaacactctcgtgggtgcccttcctgtggttagggtaatcagctttagctaaccatctggtgttttcattcacagtcttttggaactgcaacccagtgtgcgtgtttccagggcgactcagttcaatggggtttgttttggaaacctagactgagactgactcagtggctgagttcagcattacgactatgaaggccgggaggctgtctccaaagcctttgccttgggactggttctcaggggcttttaggaaagggagcacttgaactagaccttatcagaggtgttctgtgcgcggtggacagtggttaaaacagacatccgtatctgattagagtgtagagagtgctcagcttcatagggagtgtctgtatcctccatgtccaccctggctcagaggtcatctctgaagaggggatggaaagattgtaagagccagaggttaaggaggacaggagggaaactgtatcccagacatgacaggatcactgcattcatgaatgcacagtagctctggttgcttgcacaagacccgcacaagaccaagccactcaacattttagcctgaatgctcacacgctcccagagatagctgcggagctatttacagttgatggtttcagagggagagagaactagattttttaaagggtgtggtccctgctaggttggcccatgctctggggaatggccgcacacctagaggtctatgggccatataaaattggacttggtaggttattaaagaaaacacaaagagggcaggaagttgggaggggcgagaatataaaagtcttgggagaattaggggtagaaaaacaagggaatatgatcaaaatacaatgtatgaaattttgaaataataaaaatagtctatgaaaatgaaataaatgagacagtatatttcacagtggaaatattagcatacacaaatggctgtccatttgttctgtccagtgtgacacttcttttctgtcttttttcccccttccccatttgtgtggatacctttcccaaccagtgtaagtggtatgccaagccaacttgtctgttttctgggtactgcctaagtgtttgcccatgttaattcactcaatactgcaaacaccatgtgtggtaaaatacaattgttatattttattgatatggcaaccggagatatgattcggttaaagatctgcctcaaaataaacaagaagatcaggcaagattggaaggcagctccaaaccccaggctcttaaccacaaacaacactggccccataaattctctgagtttattgattttaggctccgttagctggggaacatttacacactatctctattaaaaaaaatccgcgtgggttttcaatctgcctgcaaggagactgctatgactcaccgaggaggggcaccagggtgcgtcagtagacacgagtcccatagctgtcctgggctgaactgggttgttgcttatgccagagctctggctggagaagtttcggggaagtaccaagtgtgcaggggtagcatgcgagtgatccctccacacttgcctgcccgtcttagtttggctggatctggatgatgtcgtcttatgccaatggattgtaataagtcatttccactgatttcgaagacttggtcccctagattaccctcaaatgttctccaaataatagcctctacttctgatgtgtggcccaggttccataattcaagcctcttgtcacaggactttattccagtaactagtgttggctttgttagttattggtacatctcttcagctcggggtcaggactgcatgtggattcggatggtggccctggctctagttgtgatgtggtctgttagggtgaccagtcaatcccaagacaattccactctccagcatgcagctggatttacggaaactcacacgacctctcgaggctgtttattatgctggcgacggctaatgcttgcacttctagcaagtcaccagtgtttattccttgccatgaccctatggggttactgaaagttccaagtctcatttacagtcaaagcagcacaagtgaagagtgaaagatatgtgtatttcgtctgataagaaacaaagagatgagtcagagcttaagctgagggagttaaggtgtagactctgcgctcctgactgccaggctggctcaccctggtaggcagttggggctttagagtgcagacaaagcactttcctaaagagtgtcttgttgcatttaggttatttacattttcagtagactttggtttttattgaagttgataggctactagaaaaaaaatgcaatgccatgcataagcaattctccaaggtttgtctttagattaatttttcaaggggtttagcaaggacacaggacacaggatgtagtcccaccttgtcatatgttctgactgcttccaagggggcaaccatcttatggaagaagaaatcgaagttcaaggatgttataaaagccacttagagccatccagctggcaagcagggggctgtttggggcagtctggctccagacaccatctttctaattgcccattcttctctccagtgggagggtttctgggcttgggtttgggacacgaaggccaactcttcctgaggctgactcatgcctcttcatccatttatccaatagctacttctagcagacctactgtgtgctagagcttgttagttctggctatttactactgtgatacatgtatgctccgcctaggttcttccagatctcattgttggattttcagtttctgcctctgtaacagataagcatgaaaaacagatgagtagttctcacccttttggaagcccgtgcctgtcttatttataaagatacctataaacgtagcttatgccgtccttaatgtttttctgcaatttccaagtaagtggcttatggtgactaaaaataaaatgagaacaattctgatgttgaataatttttgtttgaatcacacaggccctcgtctctctcccactctgttccccatcacagccttcattcttttcattaagaagccctgggtgctattctcacgctaaaacaaagggatctaccgttatagctctaactgctctgagccgctggggttgcgtctgtttaatttatattcattctctcacccagtcctggctttggggactgtgcagcaaataaagcattgctcatttcttttactgaaaacctcatcccccccatgggacactggtgatgggaatcatgtgctttggagccatctgacatttccccatcctgtttggggagtgtgcagcgagggacatgcccaggactctgacacagcaggcccacaggctctttgctcaagggccttatgagttagatgtgcttttggcgctaggaaatgcctgggctgtttctactctagactttcatgggaaaggctgcttcacggacctcttagggacagcagatggcttataaatatctccggaggtctgggcttctcacttagtaacgtgtaactccatgctgttcttgaaagtcttcgtagattcacttgtaaagtatgaggagccaatcaccatggacggtaatgagcagggtatactgattgtattgcaagaggagagagcaggggcctcatgattatcactagaggaattttttaacctggctttttagcttctttaaagacttttttaagtgtgtggtgtgttgtgtgcgtcgaggggtgtgtggacacacacaggagctagcgcacgagggaaggcgcttgtgtcgtctagagaggggattgattggatccccctggagctgaagttacaggttgtttgtttatgagtgcctgagatgggtgttcggaactaaacttgagtcctctggaaaagcagaactgctgagcaatccttctcgcccatgcctggacttttaaaaacagtgcaatgagttgttaaaaaaaaaaatacagtttttataaacacaagcttctccacctgtgctccatttcctgaataatgactcagaggtttattaataattataatgctatgaccttaagcttaggctctgccccccccagcccccactagcatgtaacgtacgtaactcatttattatagtctatgtctgccacattgcccgttacctcttctcagtttcatgcatctgacttcctcagagttctgggcgaatcctcccacctctctctagcgtgcagaataccaaaagagttccatcctctatttcctgccttttgctaagaggccatcagctttttattggtgatgcttccatacagtacacaagagagtctctctatgaattttctcaacaaacactgacataggtacatgttttgtgataagcatcaagagatgggtgatgctcataactggggttatgctggcaatggttaaagaatggatcctacagaagaggtactcagccctggtgtgtagctttcggcaaatctcctgtgtgcgtactctaatcatggtgatttgaactactgtcatgatgtctgctgtctgccagaatctctgaatatataagaatcattacttaggagcctgtaaaagctggtcctgaaccttcagccagtgtttgctttcagagacagatgaacagatagaaagtttctccaagggccagtgacttgcctatgtggtgaacacatccaggtggttcagactaacgcagctgggttagtaaggaagaattctagggagagggagacagttacctttcaaaacagtctctctgccttcaagccaagagaaaaggcgttggactggtttcaaggttcctggcagaccagctacatctcaccctcctaggttcgttcccacactggctgatacaaaccttctacgctggccagcccaggatgttgtgtccagtcctgagcacataaacttctcttgcttccgaaggctcctcattcagaagatgctctccctccatctccatctccctgccttgttcagccttcctgtgcacacaattcccactctcagacatgaaaggaaaagtgacacagtggactgtagtgaagtgaaccatttgggttcatcacgttactgttaaaatgggaaaggaagatggcgtaatcaggaggtatggatggtcctccattcaatacgggcctgggttcaggatgaccaagaactctcccaaccacatatagacaagagtaagggagctatagagtaacaataacagctgtcaataagagtgaaaattggtacagtctttccataagccttttggtagtatttattaaaattatgcatgtacacactaattgttcccttatataggtaaaaatatggcacgtgtgttacctaaaggtttattctagactgctccttcatatgctgtcattataaggattccaaattgggaaaaaccatatgctgatctataatagagagtaagtcgtggactagtcacaaggtggaatgccatacagctttgaggaaacattgagtgtcatgctatgtgatattatgagtgtatctcacagatgtaattgtgagtcagaggggccagactcaaaagaatacaagtgaaaatttttgtatgcaaaattgtctgcctgtctgtctatctatctatctatctatctatccacatgtacatgcacacatacatatacctatacccatatatacatactgtttgcctgcctgctcactgtgacattagttttaccccagggctcaccttgggtgctgttttcatctaggaagctactctaacaaacacttctgaggttggtcagatactcatgggctggcagcatttccccagagttacctccttatatcattctgtaattacttttctgaaccttccactctactctaaagggctgaacgggcagtgactgcatcagtttgtattctgggtatttagcacagttcctggccctgagggattgatcactattaaataattgcagagggaggtctctgtattgtgtgagagatgaagctttcaatcacggtgaggtacgagagtgggagaaagttaggtaggggcttgtcacttgtctgaggtgtctttggaagttcacttcaacaagtttaactgagttgtaaagacgtaagcatcagatactctgctcatagccaccactcactgagcaactgctacatgccagatctcaaactgctggaagctgactgtattgtttaagtctaatgatcatcatgaggggtccacatcgtcatcctatcttgcaggttaattaaggctgagagagctcaagtaatttctcctgggtcacacagcaggtcagtggtagcactgagctaatgaacccagtgcttctggcttgaaatgtaccagagcacatgtctttaggttctacatctctcatattgaaagcatatgagctaactcattctggaattatgcacatcttccttctgcttattgctgtagattatggatacctcgtgcatccattgtcctcctgtgctgtttaaagggcaggggagaaggggatggtgaattccatggatccagcagagcatctgacccacaggggacacggaaattgcatcgtttacagcaggcaacactaacataggcttcacttagcagaagttcacaactgaagcactcggaaatgtgggcatggcagtactacactgggcaaatgatgaccctgtagatggactgagcaggaatatctggccacccttccctgaagtccctttaccctctcaggcctctgggctcagagttcacaggctgagggtgtgtttgcttggctgtgactatcccctcagtttctctttctgggtatcttatttcataagctgagcctgccacagagctctgggattctgctggctttagtctgagcctctggctttcattgctgcccttctagccagatctgggaaagggtttgaaaaatgacactgattggatgcacatttgatgaaggtgatggatggtcaggcaactctgagtccctagacccagatataattgacaggtgtaccctcctgatgggagccaagacccagacttcttaagagaggccccctcccactcctctccacccacacccctactgtttgcctagctctttctgcagagacccaagggagctatgggcctttccctgcccctggtcctcactcagccacctctgtctccttggtgctgaaaaaccccgcctgtgttagtcttctatttggggctgcagagtctcttcccatcccattactgaacacatgccttggctttgtgctggggacctagtatctccattgccttgctatgtcggacccctcttcttgtgccttcccgccttttccgtggatcttccattctcatggagcattttagctagatcttgaattaaggtcttattaggggagcttcagagcacatttgtgacaactctttctctgttttcgaatttcagagatttcatgggttggggttaaccagctagaagatgcatgtcttggaaagggtggaattccagactatttgaaagagagccaagacctgcccccagcagtttagagaacaacccaaatattgggtttaactggtctgctagagaagtcataagatccaggtcctaagaaccccttggcaggcaaaagtgaaactctatagagtctcccaacagcatctgctgacagtggaagtattccacgtttctaatgagtgtaggcttaaacatacttgggaaaataagtcccggtaagagattactctgacagctctgcatgctaacgtggactgcttcttattagagcagagggggatgggctttctgtttgtttttggtgtgtttgtttctgctgccaaggtgtgttgtaatgtcaaggttgtttaatatgtatgagcctccaccatgtatgagcgagaatcagagtgcatttgctgtgaaatgagattggttccagtcatttaaacagctccaggtgtaataagagtcgacaagaattgatgccaagaactgctttaaggattaactcatttagtcctgaggctggtcctttcaggcaggactgccattggcattccacttttagataataaaacttaggtttgcttacaataatacaggcaggcaaggctagaggtgacattgaagatgagctatcatgttctaaagcctgcatgtcaactgctaacttaaaacctgtgacgtgttgttgtaggttcagatggtactggacttgtacattctaaccccgagaacctacctttattgataagagtgacaacaactaccaatgaaggacatcctctttgagaccgaaaagagaactcgatggtttgttagtcactgatgtttgtaatttgtccacttgtttatctgcctgagactggtccttcttaaaacactgctaatgaaacaggatgctggcatcaacgaaggaggaaaatgagaagggagaagagtaggaaggcagagtgatcaaatggcagaggttggtgggataaagcgttcaagaagaacagaagctgtccaagtggatgctctgctagtcctgagggttgttagtcctctgctgctgctatgtgcacccttgaggctggccaggcatcaaagatggcggtgctcatgctcacttgattctgtcttactcctggataaatactgctcctacttccccatgtcactcaagtaagaaacacagtttactctgtcccaaaggcctggctccagcagttgtcttaattgatggttttgaagactgtagaggttttgctgttggtgagtgttgtaagggtgtctgtggttctgtgatctggcctctgcaaactatccatctggatgatgtataccatcaagctgttctctgtattttgttaaaatgtattttcaattgcttgtaagttcatttcaacttccttcctgaaaaaaaaaaactcactaattattcctataaacaccatcagttgtgtgaaagtgaaagcctgtttgagtcaggccggtggcacaggtctgttttcttatccacgtaagaggcagaggctgatggaccaaaagttcaaaggcagaagggcgagctcagggtcagcctgggccacttcatgtgacaccatctaaaaatgaagcatcatgaaaaactattgtgagtgttcaagggtggtatgcttacctataacaaagccctgagattactcagactaatgctgaggatgagagagagagagagagagacagacagacagacagacagacagacagacctaggcttagctccataatccacacataaaaacatgaaagtcaaacttctctttaaaattcttaaacctaaatgccgagagcatgcagtttgcacacatttcatttaagcaagcctcagagagaacccttcactccaattagcttaggtaaggtgctctcatggtaaggttaacatgtcctgtcagtttgtttgaagctgttgggagagtgacatcccatctaagccttaacctgagcagaagcctctatgcgctctttgcaaacaatcatagctactcaggcgagagcttcactccacagccataggccatgcagaggtgttagccattgtaggggcagtgaccatgacatttgcctagagcacatcccttaccacatttccagtgtcatgaggttctaaccatgtgatcttcagtcctgttttaaggcccaacccacctctcacttgacattttacatatcattctgtataacagaatcatttgccatgttgagtttgccattctcctcattgctgaatcttatcccttggctcaggtcattataagcaccatgcctaccaggctactgtagactctagtctaggccctatttcttatgctacatcccctttcaggacgtagggtcacacgattcaactaagcacccatcatgtacaggtgaacttctacacaagagggtgtgcttgtctaaaagcgtgggagttgtgacagttctcttgccaaacataccaaaatgcacactctaaccaaaattctagaagaagtgggaattgagacgtgtactgttgagacttggggtcatggcaaggcataagaggaaatagtactgagaagacatgatgttgtgttaactgaccctaggaagcacttctagggcacagtggagaataagcatgcccagctcatgccattaaattgtttatagctagtgttaagggcagagaaggaaactttatgccttgcagctagaccaacgttttctcctctgtagctgatcactcagtgtggggtggtgaaaagaaaccagagaagccctgagcagcgtggatttgtgtttcaatagcattcaacaccccgatgaatcatttaggactcacggagttgaggcacagaaaaggaagtggaaagatagcggcagtttaccaatgtgcttgcagaagaacacagaggggacgcagcacaacagagagggttagcttgggaacattaaatggcgtcattacacatggctccttttcactgtccccacatggtacagcatagtgagaggagctctatggggtctccttatgatcttctctattaaggttttcaaatggaggtcttacagtatagcccaggctggtccccatctcccagcaaccatcctgtcttagcctcccaagtgctgggattctagctgtgtatcaccacccctagttttggtgtctcttaagagaggattgaaagagtccttattatcttttataaagatgccaaaagatctctgtcacaaatggggtaacaggctccaataccattgcatagtggggccagtatttcaccatgaatttcagagtcatatatcagcattcagcaccgtctatgagacctctgaacagcgtgctctctattgtgaaccaaaaggctttgtcctagcttctgcttctaggtctaccacagcttcttgaagacaggccctgaggcacagctcagagagagcaagtctccaattccaagccttttggcgcttgttccccccacacccaccctcattaaggcttgctctactttgaagatgtctccaagacccagaggaagcccttagatagctttgtttctgtggagatctttggctggacttttgctgtctctcccagaggtgagaggccgtggttcccaaagcctcgggtttggcaccagctcctccctggtaagttcagatttcaaatcttactctggccacggcctcctctctgacctagagtgaccttacaagccaccaagcagacagactcttagcctttaccattggtggttttcattccagacaggagccaatgggttttagaaacggaatgagtgggtgcctctcaccatctccactctggcctgggtctggcagagatttcctctgtggcctgggcaaggaataactgatgaaaccaggctgtcccagtgctttgtagtgtgtcgagcaggcaaagttcttattactgtcagatggcatgcacctgggctacataggaaccatattcctcctgagttggggacggctctgctaagctgtggtgggtcctatacgtgtttggaaccatgacagcatggggaatatcagcaaccttggtttgagaagctcagtccccagccccaatggatagttgataatgcagatactcataactggtcaaagtgataaggataagtgacagttgagtgtccatctctaaatgagatatctctatcaagatgctcctcaccctaggcccagggaacaccacagaagggaccaaaagcatctaagcggtagaggatggagggagtgctatgaagtatgctcttgataggacatggctgtcacacttatgaacttacaacagctggggtcccctgaataaaaacctgcattagatcaagcctgtcagcatttcaaaggaatgggggagggacttgtgaaacccacccctggttgtagttgatggctgtagagggctgtctgttttggaagggtttagacaatgataggttacatacactccaatagatgcacccaccccaaaccacatgcatgtaggagcactaatttgtctcaatggctataaagaaagaagagggcattgaggagggtggggtgggacaagggggaactggagaaatgggatggtggggtttgggtgcaataatgtcacattgtatacatttttaagaatgttaaaaataaatgaaaatattactttaaaattttagagcattggagctgagagacagcttggaatccatctattctcgtttagcccaattcctttagtgaagaggaagctgggccctttatgggaactgcaccactgcccagtctgggtggggggtggtgattatggtagagcccaagctagcgctcaggcccatgggtgggtttgctggtagtttctctttctgtcctcgctggttcaggatcctttagaggctgtgaacaaaatgagaaagatgtataccaagcctaacacactgcctggtatttagcaagtgctcaattagtgtttatcattactcgaagaaaaacttagaggaacaagatatccatgcctttgagaccactgaagttttgttgaggactcacaagactcgtggtcatacatgcacacaactgggaatttgtaaggtacaggttaccgtaggtagggttatctgctgagtcaatgggttcagcaatggaagagatatgttatgactgcctataaggaggaaagaacctcatggaagaagcatgtgttctctgtnnnnnnnnnnnnnnnnnnnnnnnnnnnnnnnnnnnnnnnnnnnnnnnnnnnnnnnnnnnnnnnnnnnnnnnnnnnnnnnnnnnnnnnnnnnnnnnnnnnnnnnnnnnnnnnnnnnnnnnnnnnnnnnnnnnnnnnnnnnnnnnnnnnnnnnnnnnnnnnnnnnnnnnnnnnnnnnnnnnnnnnnnnnnnnnnnnnnnnnnnnnnnnnnnnnnnnnnnnnnnnnnnnnnnnnnnnnnnnnnnnnnnnnnnnnnnnnnnnnnnnnnnnnnnnnnnnnnnnnnnnnnnnnnnnnnnnnnnnnnnnccatgatgatcatggatcaaacctttgaaactgtaagcaagcccccacctaaatgcccagatgtccctcaacagaggaatggatacagaaaatggagtactactcagctattaaaaacaatgaatttatgaagttcttaggcaaatggatgtatctgaaggatatcctaagtgaggtaacccaatcacaaaagaagtcacttgatatgcactcactgatatgtggatattagcccagaaacttagaatacccaagatacaatttgcaaaacacatgaaactcaagaagaaggaagaccaaagtgtggatactttgatccttcttacaagggggaacaatatactcatggatggagttacagagacaaagttcagagcagagactgaacgaatgaccatccagagactgtcccacctggggatccatcccataaacaaccaccaaacccagacactattgaagatgccaacaagattttgctgacaggagcctgatatagctgtttcctgagaggctcttccagtgcctggcaaatacagaagtggatgctcacagtcatccattggatggagcacagggtccctaatgaagaagatagagaaagtacccaaggagctgaaggggtttgcagtcccctaggaggaacaacaatatgaactaaccagtacccccagagctccctgggactaaaccaaaaaccaaagaaaacacatggtgggacttgtgtctctaactgcatatgtagcagaggatggcctagtcggcggtcatcaatgggaggagaggtgcttggtcctctgaaggttctacttcccagtataggggaatacctgggccaggaagcagaagagggtgggttggggagcagggggagggggaaggggatagggaattttcagagaggaaactaggaaaagggataacatttgcaatataaataagaaaatatctaattttaaaaagaaagagagagagagagagagagagagagagagagagagaaagagagagagaaaggaagaaagaaagaaagaaagaaagaaagaaagaaagaaagaaagaaagaaagaaagaaaggaggaaagaaaggaagaaagaaaggaaggaagaacagcctgaggggtagagggggcgtcaagtgtgccacccagaggtcaaaaaaagtaatgagacctggatcagatgccacttctgaggcctcaagataaaggcagtttgtcacctacctcaagagtctttgcttgtcactttcccgtttgactccttcaccctatgacctaagtcctcatgctaccttgcaaggccacaagcaaactggtgagccaaaacccaggcaatattaagaaaatgggcccttcagtttgtgacaggcaagctttacctgtgtgactcgttgcggttactctttgctttacactctgtcacctcaaagctcagtgagacaaagccacagcaagtgtttttctcatggcttcgctttggtgacttggctcacctgtctttgctcaaggcctaccttgaagtttctggaagccgctgtggtggggctccactggacggtctcctctctccaaagtgggagagtggaatctgttgtcccatgggacctcagcttggatggtcagcgggaacacctacctagggcttctttttgtggcctggactttgtcacagcatggtgcctggcgttctaaggcagcagtcccagggaagagaccagatattgttccacaaacatcatttttttcacctgttcattttgttagatgtggctccgttgagtttatattgactcagttcagttatatacagtgaggcgctagactataacaactatctgtggagacactttaaaactaccataaaggtttccctagtaagtattctgctggtttaaaaacacacaaacagtcagacagacagacagacagacagtcagacagacagaacctaaagattttgtggatggctctgcattttaggaaggaagatcagagagctggactaggagaggcagagtaacagagaaggactgctggactagataactagaagtctgaccatgcctctggtgccccagagaaaggtcgtgtaacattgggaaagacaaggtctccggtctcttaaagcttttactgttgtggttctgtggtttcggaagactagaacattccttgtgaccttccaagctctcatgccaccatcccacatactgaccccgccccctgtggcccaggccttggagagacagccctccactcatgaaggccagaggagctgggataggggtgcactgggtaaacaagaaaggctgggtaggtgggagattcacatgtggaatcctgtttggaagtgtcaggagagagagagagagagagagagagagagagagagagagagagagagaggaaatatgtgtgtgtgtatgctctgaatgaagttccagggcctgttgaaacccagcaaggtcatgtctaaggtattggcaagccaaaggatattgcattgtgtgtcatgctgaccactgttgtgtgtttggaaagagctctacttctatttagcatttatgccatcttcctcttcctcctggaaatcctctggcagcatctaggtttaacatcccaatggggtataatatacaatgaaaataggtgagtgatattatatggtgtatggctggtgcccactctctgcccaggaagagagtgcatcttccacaacagtggattcactttttaccatctcctgttcttcgaaggggaatgaggtaaggcaaggcatctggatcgttctttccttcagctactttacaaattctagttgtctccattttacagatggaaagacagaggtgaagggaaacaaattcctcctctgatgaaggcagaaggagcttttgctgttctgtgcaaacagagctggtaaccccaggtcacctgggtcacatctcaagtccttaagcatatgttgggcctctcaaggtttttggctcagggttggggacatcatgtagagaggaaaaggccaggagacccagggagaagttaggagtgaagaagactttgacatatcctcaggaatcaagataagcatgaagatgtttgggaggctctgttgtttgtgtgtgtgtctagggacctcttacccaaaccaaagtcatttctgcatatttttctgctgaatatgaaatactccaaagattactcttcttatttgttaaattcaaaatgactcagcagagaggaaaaacaagtcttgaatgacctccaatgtcctctgaatcaaatccgtgaatgagatttctcctcaccaaagtgtaatcatctgcacatgtacacacgagtgccacacagttatatctgtacacatgtgtcagcatcagcttgtcacacatccttcgatttcatttctagtcattccctggcttttcatccacaccctggacagagctgactggccaggacagcggcccttcatatgtggtccttgacataggcttcaccgaggccctcagaggaaatctatagacactgattcttcatcaaatccagcatcatgtcaggttgtcctcagctatcgggtctgggatgatggacagtctgggaaaagggtagcctgctaagtcggacatgctgtatacctgagaagttggttatacactggattttagtgcactgagtattatttcgaatgcacttagaggatttctgtttaagggtgccaggtcctggatccattagcaatgttggctactcattcaatgattcacaactttgataagtagacggaacacttttaaaacaccaaatgccattttaaacacactatgcgggatttgttattcaaaactaatcagcaactttttttttgttggttttttttttttttttttttttttaaagaactagcctgtgacggggataagaatgtaatggttttcacattaagtaagatcaggcatttcataaggagggatgtatatacctccagttctacttcagagaaaaagatgagttatactaacgttctatatgaagatacaaaggaccctaccatctctgggtttagctttctctaaggggcttgggaagaacagagctgttaaaacttcttactcactaggccagaagaccccaacagttgcctggacttcctactttttgcattatgacagactgaaaacaaggggttactttatttttttatttttcatttatttatttatttatttatttatttatttatttatttatttatttattttgtttttcgagacagggtttctctgttgagccctggctgtcctggaactcactttgtagaccaggctggcctcgaactcagaaatccgcctgcccctgcctccctagtgctgggattaaaggcatgcgccaccacgcccggcttcaaggggttactttatatatatgtatgcatatgtatacatatatgtacatatatatgtatacatatatgtacatatacatagtttctaaagaaatttctgattataattgtatgcatatctgtaccatctaaatcagtttatttctctacttgtcttctgcatgccatctatcttaatttattatctatcttctgtcattttcatccacttatcaatcatatatcatctagcctttctcatctacctttcatttataatctatcaaccatttgtctattttttttacccacccatcatttactaattattttcctatcatcaatcaacattgatccgatctatctatctatctatctatctatctatctatctatctatctatctatctatcatctatctaccatttatctatcattggttatttttctatgtatatatctattatctgtcaatcaacatttatcatatatctacctattatcttcctgtctgcctacctgcctgtctctctatcccccatgtattcatctgtccatctatccactcttccatttattatctatcacatgcatttaattctatagtgaagaatagattttccagtggggtttgtggattggtctgccaaagagtgtggtttcccactaacacagagagtccaaccttgctctgagattatgaagcatgcgcattagatgaggtagtgacattagctttctgctcacttagaagctcaatattaatgtcatctttgtctctcaaggttctttctctctcacctattcactactgtgaagcttgttcccagggaggtactctgatttaactaagacagttgtaagagacaggtaccgttataggggcgcatagcccttgagttcaagagccataggactgaccaagagtgaggcatcttgtgagaaccttctgtaaaataggcttgacctttctctatgaagtgactttactgcagttgagagaggcttttgtaagttcgtcggagttcagaggtaattagtaagaagttgaactttccatactcttgtttttgttccctgctgaagagttgctcatttttgggtgtggatgccacactcctggctgaccttccatttttcttcctgatttcctagcatgtctaaatcctggtgtagacctacctgaggtagaaagtcaataatcttctataagatctcatagagtttataggaagtcctgagctgtggcttcttctatgttcacctaggagtgtccattgaacacggggaaggggaggggattttgagttgaagaaggggggagaacggattctttactacctattctctttgagccacatgcccattgatgttccttgggaagtgttgagctgtgggcagagaagtaccagccttgacattagggtcactaaaatcgatgttaactgtctttcctcctaacttcatggtccagggaattaaaatcaaccttgttttgaggcagggaaaacaagatccctaatcttagatgagtcatagtctgacttggtagacagacagacagacagacagacagacagatgggttaagaagagaactatactcatagtagtggatgggaaaaagtagctggtacaggtgagactgtccagggtgttaatgaagcaactgtgctttctagatctgtagaaagaagatgacaatcccccctctacatgattgtgatgactgtgatatcatacatttgaaagatcctcaacattcaaaactagaaagacacaaggtgattctcaaccatttttgtgctcccacttgtaagatgttttaatcaatatggtctctgagtagtccaagtgtcttttggagatgcaggccatgttgccccaacacctcccattctggaacatgcaggattgcctggaaagcatcttgagattctgacagccttatgccaagaataatgttttcatttttttcagaaaagttattataagtgacattaaccaaaaacacattcccctcttaaagatcaaacaatgaactaggaagatggctcagtgtataatggacttgtaaagattggagtttgggtctccagaactcacataaaagccaggtaggcaggtaggtgtggtagcctgctgaagtctcagtgtgtacagggaattcctggagcgagctagctagccagactagctgcatcagagagctgctgttcaacaaaacagtctgctgctgcagttaataaagtgaagaatgacccaggaagacagtcaataccaacctctgttctctacacacaggtacacaagcatgtacgtacgtacagcacatacacacaggcacaaaaaaatagaattactatgaataaggcagtctccataattgcagtcattcacgagtcctcttgccaaaatctgcactctctctaagatcttctgctctgagggagtcattgttaccagatcatctgtgaatatataaatgtgtgtgctcatgaaaacatatagaatgctccaaaaagactttgcagccttcttgttcacctaaaaacatgtcacaagtggcaagctatgtgaccgcgcatagctgtaactcactgtttttattttaatgagttatttactttatgtgtatgaatggtttgtctgcatgtaccacatatgtgtagtgcccagagagaccagaagagagtgctcaatcctcctggaactggagctatagttggttgtgggttgatatgtgggggctaggaggcaaactgagtcttctgtaagaacagccaatactattatacgctgacccatctctccagcttctggaattcattctttttttgccatcaaaaagtatttctatagtaggaacagcatagtacttagcatcctcctgttgataaacatcttcccaagtttttgttacttagaaaatatactgcagagcacttgtgtgtacacatatgctgtatgtacctgcaacctgctctctaagatacgtaacatgtgggcagcatggtgcatttttagctgtggagcatgcatttcacaccattgtcaggtctcacgtcatcaagcttggatagcttgtgagaccaattcagcgactactctggtgttttgtttttggatttttctgagctagaatgctttcagatgcaatatactgtcccctttgttagatgttctttatttacttggcccatatttctagtggctttttacaacagaagttgtttcacttcacagtttcaaatatttaactttgttccttgcttatctgttaagtttataatatctttcttgttccttggatgttttgaatttttgtggggaaatgttattatcactatttttcttctatggagtttgctttttatgtctttttcatgcaagcctttctttagtttatagcaaattcttgtgttttcttgaggtcctttcattgttctgtctttacattttgggctctatatttttgtgtgaggtgtggatatgccttggcttttgtttttgaaaaggctgttgagccactggcactgtcattgatgttgttttgttattttaatgcttatttatcaaatgcttgtttattcgtgaatggcttctggctgcccagcctctccactgttctgcttatctgcctctgaaccgctggcatgcttagaggatttttactgtacggctttcctgggacagcgtatccacttctgcagtcttcaatcttgttttctttattgtttacagcttctcctcacatgccctaacatcttgtttattacgagattgaaaggggaagaaatgatttagagcatttggcctgtcagttgctgtctctttatctttgcatacttttatttttaatttcattttttggggggggggtatttttgtttttgcttttgagtcagggtcttttactgagcccactgatttagctagattccctggacagtgagattaaaggatccttttcttgtctttgtctccctagtactggaatttgtagctgtgtcagtatatcttagtgacatggattctcggagatcaaactcaggtcctcatgcttctgtagaatacattactgcctgagccactgacccagcccttctctgacatttaagatgtatatataccacgtgaatggcatttcccaaacaattgctgagtaaatgaatacaaggcaatactctgaccaggcacattttcattttgaattttattttattttaagactaggatgaagtgtttgttataggacttcatgttgttagtcacaaaaatgcacagaggaggactctctcaactgctcatcgtgtttccatgattgctctgggctctgtcatgtgccacatgggtaaatactgaatccttgagaccattgattcagagggttttgtctgctcattggaatccttgaggaaaattccttttagggcaaaacatttcagattagctagatatagtcactgagtatttgggtctatgatggtatttatcaagcctctctgttgagcgttttgaacacagtagcattgagaataaacatggagcttacagaaaggatactaaatagtcacggtgaccatacatagttgaaagcatgatccttactatatgaaaagctatgttttcagtgcattgagcaattgagtcagaacacttagctgcagaaataactattgaataaagggggcaggtaaggaggaaagagcttgccagaggtccataggcaaaagccaatagaagaaataaatgagaaacttcagtagaactgagctggagagtaggggcaatagaatagaatagaatagaatagaatagaatagaatagaatagaatagaatagaatagcagactaaagggatgatgacaatgtcagtgaccccaggcagactctggagtcatgcgaaccccaggcccatgtgcctgtttgcttctttgtgctgtaacatggggccacttgtttaaaatcagattagctatgtaaattatttggaattctttttcatggaaaatgagctattctccctcatttgtttattcagccattcatttacatcaacatggatttgtggatatttatttcatactctgagttataatctaatactcctctatttgttttgttgaccaaattgttccagctttcattactgggagaactttcagttgactcctatgtgcttttgatgtatttcatcgtgtgtgtgtgtgtgtgtgtgtgtgtgtatacacacttgcaagattgcatgtgtgtgcatacaacatatattctaggcttatcttgtgtatttcctgatccagtgctagactcaaccagtttttctaaagacctctggttcttttattggaagatgggattagaagccaagatctgggcacttggtttgcactgacaagatgctgttgtctctaggcctttcagctaactgagtgaaaggacagtgcatatgtagtatattcacttgtatacatacaaataactacactatagatagatagttacaatgtaactctgtatgcctctattaagctaaatctgggtatatattgatatgtccatactgtatctaatctgttgtcacatgatcacttggaggaaaccttaaaaaaagaaagaaagaaagaaagaaagaaagaaagggaaaggaaggaagaaagccaaaaccaaagactcaaatgtcacttcaaaactaatggatcaagataagtgttgatttatagagatttaaaaagattaaagttactgaatgtttttcttgggttaatgttggaattaatgttgataatatgaaaatattagctgccatcataaatatacattttactttgttactaccgtttggtattcgcgtcggtaatacattgctacctgtgtgtagttctgttgatttttacttccaggagtgagtgtttaatccaagagagttggaaaattcttgcacttaatgatccctgggtgggatttgaggctttaaatgtggaaataaactttacaagagtcccagattgtctgtgaagatcgtgttcccgtgtgctggtgaaatctgcattattcacttctcttccttctctctttccttgcattgtcggtgggctgcagactccagatccaactccgtcttctgaaatgatcccgattcccagaatgcccctggtgctgctcctgctcttgctcatcctgggttctgcaaaagctcaggttaatccaggtaacacagccactactcagctgggtgctgaggaccaggtgcctgcacacacctctgccagtggttatcttagaaagagctctgccaagaaaactccactgtcagttctccctgtgtggtgaaccgtggccacgatggtcagaaacaggaagttgtatcactccccctctccttatataatgtgttgggtattatacaagagattttacgtagaccagagccatttcaatggcattaaaaaagattaggaaaaggaatggctgtttcatgttgtgtattttggggaaaatgggaaattagagatgtagcagacagcttcatttggttggctcatccattggatgtcttgggtctggattttaattgagtgtcctgttatacttttgggatgctaattctgtgggatgccgggttcccaagatctcaggtaagcttttgttctcacaggatgtgactgttcaaaacagatgtgaggtgactcttttaagtcaatatttttggattgttttagttcatatatctttaaactttaacctaaagtatgtgattgtatcaactgtctgttacacaacatgttgcttaacgattgtcaatagctcagtggcttaaaaacatgaatgtttgttttgctcataagcttatagtttgatgttttatctgtcttggcacatttacccatctggtaatattggctcatctagggtttctttggccctgatgaagggcactttggctgttgctctgtggattcctctagcagactagcctggccatgttttcgtggaaattgcacaagagcctgagtagaagcagcgtatgcaaattcaatccagtgctcaaattatgtttgttaagactgtgtaggccaggatgagggctgtaactgaagaccttgtctggagggatgcgggctggtgcttggtagtgcttgtccactaaggagaccctatttcaattcctagcactgagcggggggacctcattggtcaaagtaggtcacatacatgtgctcagagtccatagaacaaaaagaatgtgtatgataaagagataggtacaggttgtctggtttttttcagtgaagaaataaatctgtgggctggagagatggcctagttgttaagagcacttgctgttctaccagaggctctggctttgattcccggaacctacatttagttcctatcatggtgggtgtctcagaactgcctctaattccggctccaagagatccagtgcactccttgactaaatggaactccatcatacccctcagatcttaccccagaaataatcactccccgaatgtattgtatatcccacacatgtagattttactaaaacaacacatagctggggatatagctcatttgacagagtacttgcctagtgtgcagagagtaccatagaggactgagagtggcgtgcatacctcttgccagtcgtggtggcacatgccagtaggataggtaaagattttaagtcattttaaaaattcttcctcaaatacaaatatatgaaagtacacatatcttagtgttcagtttgatggatttttacaagcccaagatatccattcagacctgtctaacttgaagcagagtctaactatgaatgtggactaacacaaattgtacacttacataaagcatgagggtttttttttccccattctccttggacacaccagaggagggcatctattacagatcctattacagatggttgctgggaattgaactcaggacctctgggagaacagccagtgctcttaaccactgaaccatctctccagcctgtgaggtttgtttgttgttttgttttgttttgttttgttttgttttgtttttgttttttaatgtgattttttttgattgtgctgcttctcaatgtgaactttgtagatgacaacattgtgtggcaatatcaaagattggacagccctggcagtgagctacccttcatatataagaaacagaggcatcatggagagctctcacctacctcgccctggtgacagcaattatgttgctctctagcaagaaagatgaggtttccctgcttgtattttatataagtggagacacaggatacatggacactgtgcctagcttctttaactgaacattttctgtatggcatttattccatggctacaagtactagctgactatccttgctgtggtataatattacttcgtgtagttcatttatatggtctagtacagatgggaatttggatagtttgggcctactgtgaagaaatcttccatattcttgtatagagtttgtggtaaggacatatactcacttttctggggtttatatacagaagtggaattccttggtaacttgtaacatatcatttagtgttcttcataatgccatagagttttccaaagtgtttttttttatccacttagcctcccacaatagtatgtagagttcaattttccaactagctgtaattacattatcaagggtacatccatcttgtctttgtactagcataatggtatatttgtgagagtgcttcctcccaccaagtctgtgtccatgggctattctttatgtccttagtaggaaacatgatcaaaactcctcaaataaaataaaataaaataaaataaaataaaagaattgttgtttgagtggattcagtgcctttctcattattataataagcttagtgaaggcacctcagatcttaactccaacagcttttagtatttctgctgtgtattcctcttatcctctaaagtttggtttgtctcctctgatggtctttctgctctaagctccaaagaggagggggaagggtgcacacagttgtcatggagactggtatacccaggcccacttaagcaattaaaccaagagaaccagtttctagttagaatagaaccagtttcttgtgttagaatacaagctgtagtttttgagtaggaaacgggctgccagaaggcgatttcactccctgtcttgctattaggcattttcgttggatctttctgccagcacaaagaaatggacatcttaattttgaaccatgttcctaggcatatgctaccaagtgaagggctgaccattctctttgccacctccttccatttaccagttaagctggagttgaggatgtagagcagacaacaatttttccattccagctcagttttaaatggctgtctaggaacttggggctcatggagctgtatggtttggccactacttagtgcagagtagatacataataaatgctagctgatttagaggagacgcttcaggggttcctactggtgtctcccaaaagactgaggcaactgaaagtactgattgttacagatgttgctcagggacaagcagttctgggcttttaggattgttcacacaggttagccaaactgtataccagagagacttgggttataagcaaatattatatgatcaactcttagaagaagttggtttaagaccattttagaaggtatcagaaatcctatcctaattagttataagccaaatttattgctttttgttttgttttaaatctttttaaaaatttatttattgattatgtatacagtgttctgcctgcatgtatgcctgcaagccagaagaggacattagatctcattataaatggctgtgaaccaccatgtggttgctgggaattgaactcaggactgttggaaaagcagccagtgctcttaacctctgggccatctctccagcccgccaaatttctctttaatgattgtttgaaagaaagaaagaaagaaagaaagaaagaaagaaagaaagaaagaaagaaaggaaggaaggaaggaaggaaggaaggaaggaaggaaggaaggaaggaaggaaggaaacggaactcagcaattcaaaattttaaggccatccatctacaatgagacagatatttttctataagagtagaaaagttggtaatccagtagaaacactgcagttcataatatgcttgttaataattgtctcatggcttcaggcaccatctttggcactgtggagtctggcagcctgtgcagtgcaaagtgcatgtgtcctgcactaaccatcaaggtcccagtgatgctgtgcactgcaacatgggtgagcacagccagaaacaccccgctgctacacatcccagtctgagctgatctttgtcgttgaactttcaaaaaaatgtttgcaattcctgtgttctgtaacccccacccccacctcaagtatgagattgtgacccacagtttaagacatcaggctgtaacccatctgagttttggcaaaggagttggtaagtccagtgacgatactgacatttgcatagatggcggtgttctaagtagctagagaggctgtggagcaggccctgggagtctccatgaaaaataccgagatgctgcttgttccagttctgcagtatggctagtgtgctagcaaccgtttagttccaccagtgcactagagtccaaacctaacaattgccaatctgctggaggaagtaatggaaaggctgagggtagcattgtaaagcagaggtcatgattcagaagttagaatgaatggcaacctgcacccagcaaacaactaaactgccagtctctccaaggcatctttacaagccagcaagtcaatttaggtgggattagaaaattctaacgaacaatgtgaagttcacttagaaaaagtcttagctttagtgtttatttattctttcatttattatttatttaattagcttataactacaagttgattaagtttgaggttcattttgaagccaaaacaatagcataaggctaagagaggtacagagaattcacacttggaaacttagtctctttgtcgaactaaatgaggaagtcctaaggcagaagacctttggggctagttcaccttggcaaagaaactgaagtactgggtatgttctgggtcccttctgtaacaagttgccttcttacttccatcaagactgatgtatttctatttccaaattggaaaattattatttacctgggttctcactattcaaatttcaagagaaatgctgagagtataatactctctctctctctctctctctctctctctctctctctctttttctcctttcctccccctctctctattgctctcttgctctctttctctggtgattggaacagatccctgggagggaatgatataaaaaagcaagacagatacgttcctggatgaatttctctcaaatgagctatctagatgggctctttctttcttgcatgtttgtttgtcaagtatagccctggctggcctctggtaccctttcttccagtaaaagaatcttcctttggggacaacagaaactcaactgtccctgaactcttctgattacaccaagtaaggaaaaagaaactgttcgttgaagagctcattgaaagcatcaagtgatattcaaagatcatgctacatgttcctggtactgtattaagtcgtactaataatgtaatcttcagaatgtaataggagtatgtagtattattattttagttttacaggggaggagtggggccccacaaatgtttggtgaaaattaaatgttatagaggaatcagagtagcctagatgggatcctgtctagtactatgaggatgatagaccttgacctctgagctccactgcctcctgaaggtagtgagacaactaaataccaatgtataggagtctgtgagtcatgggccagttgtgtgggcatagatactagggcctaagaagctactgcagttgaatctcaaaatttgatttgtggaggcaaaagtgcattttgtaaaagaaaacttctctgttactagatatttgaaggactctgtggccagttctcagaaagttcaagaaagactggtttaatctagtcttttacaaatgaggaaactgagtgttgtggctgtatcatttctttggttatagtgaaatgctccgaacaaaaggaacacaggagaggaagtttggtttgtagttgtaggttatagtccatccctgaaggaaaatcaacacaggaactcaagtaacacccacagccaagagcagagagaaataaatgtatattgctgcttgcttttgctcagctatcttttttcactattatatagttcagaaccccctgcctggggaatggtgccacccacagtgggctaggtcaattaacaaacaagacaagcccttgcagatatggcaaaagaccagcctgacttagacaattcttttatgaggctatcttcccaggtgattctagattatggcacactggcacttaaaattaattgggacacaggttcacagagacaaaatgatgggaggaaacacccattaaaaaacatactgctaaatctacctttgtacataggctgtgtcctgattgtatgaatgagcatggcagggttttcagcctttgtttgaacacactcagtcttctcatctatcattgctaaccacctacggactattgcaaagaacaagattatgcatgtaaaggacctggcataaacacccaacacatgaaaaaatgcttaagagataccaggtcttctggccttaatgtatttattgtattatgatgattgcatacttcattaacaatttaattattctacactgtctcatgtatttgaaattgtgtagaatatactttgtgtgtgtgtgtgtaggagttcatggatcttacatcttaggatgaaggagctccaagtgtaatttcttgacaaacagtattttatcccaagtatctggtagattcttgtccatgctctgaagttttgcttgtattttgttatttttttatttatttatttttccttttccattttttattaggtatttagctcatttacatttccaatgctataccaaaaagtcttccccatacccacccacccccactcccctacccacccactccccctttttggccctggcgttaccctgtactggggcatataaagtttgcgtgtccaatgggcctctctttccagtgatggccgactaggccatcttttgatacatatgcaggtagagtcaagagctccggggtactggttagttcataatgttgttccacctatagggttgcagatccctttagctccttggatactttctctagctcctccattgggagccctgtgatccatccattagctgactgtgagcatgaacttctgtgtttgctaggccccggcatagtctcacaagagacagctacatctgggtcctggtaagaaggacacatgctccactatgttcatagcagccttatttataatagccagaagctggaaagaacccagatgcccctcaacagaggaatggatacagaaaatgtggtacatctacacaatggagtactactcagctattaaaaagaatgaatttatgaaattcctagccaaatggatggacctggagggcatcatcctgagtgaggtaacacattcacaaaggaactcacacaatatgtactcactgataagtggatattagcccaaaacctaggatacccaagatataagatacaatttcctaaacacatgaaactcaagaaaaatgaagactgaagtgtggatactatgcccctccttagatgtgggaacaaaacacccttggaaggagttacagagacaaagtttggagctgagatgaaaggatggatcatgtagagactgccatatccagggacccacccccataatcagcatccaaacgctgacaccattgcatacactagcaagattttatcgaaaggacccagatgtagctgtctcttgtattttgttattttacactcttgagactaaagtctcaagctttcaagaatcagacagttgttggagtacaggagaggatagaacttttcttccagtggtcatggagtcagaatgcttggagacttaggctccaagccacagtgccaggagcatgatcatgtaattgccatcagaataccacttcaggttcctttcctgggcctcctttctttgccaccaactgcgaactcaggttcactttgttgagaggccaagagaccacagaaggatcctcaatcctgccaggaacatacaaggtgtcagtgtctccagtcactgagggccttactaaattgcttagactagctccaagaatgctacatagcccaggctgactttatacttgggatgtacctacctcagttaggattatatgtgtatactgtcatgcccggtttatttatttgtatatttacaattatgttcacacggtgactgagttgtcaaatctccagtgtcttgctggctgaaatgctaagatatgtccgtgagctacaggtcaggtgacaagaggaaggtgatgcatttgagtgcaaggaaaggtatggaggcacacatgaagaacaaaataggaagataggaatagttgccaataagacgtcacaaaggcaaagatgtatacaggtggtacaataagcaggcgaaacataattttgaaattgttagtgtatgccaaatatttaatgaccacagctcttatctgcatctaggactaagatccacgatggacccctgactgcaggaggcaggtttcttgtgctactacatttcaatgtctctgagaccggggtattgttaagttttaatcagtaatagccctccttaagctttctttccagattgttcttcttcttggacatcttcctggccttcgagatcattcttaggacagtgtgtcaactatttgctattagcaatgggtggagagagaggtgaatagatggtgactgtggaggtcaaatgtcaagattccattctacatctgacataggtcaatgttatgaccttaaatactaaagtaaatcttggtaccacactttaatcaccagctctttgttggtataatgaaatgcctgaggcagggtgatgttatgaaaaacacatgtctgaactcacagtttcaagagcaaggggaaggacatggcagaagtgtgttcaaaaaaaagagatgaacagagccaatttcagtcttcaataacaaccaatcatggggtcctgagagagtgactttgctttctggaggtgggaccctcacctaaggacttcccaggagtcctcaccttttaacattcctccagtttccagattgccacattggggacaaagtggacaatgtggacctctgaggaacaaacaaaactcaaacaattgctcaattataaaccttactcagttataaggtggagaatgtaactttactatttccattcacaagatcacctgggggtgaaggtggggaactctgggagacagagaatgtattaagtcaaggacttgggaaagttacatgcaaatactaaactgccatttgtgactttggaaaaagaagggaatcaaaataatctagacaccccacatacaaagtttgtatcaagtagataacaaggtaggaaatggaaatacaagtgaccctgattttgcctgtagtctccaagaaagacttgagttgttagtgggaaatgagacctctgccagccctgggctgtagtcatcctgaccccaaagtgacagagcaaatgtggtgtatgtgttctagggtagagtgattgttgatttagcttttgcttttagaagtctctgaagagccaaataagcctttcagagtttttggtggtttggacacatacatagttaaaataaaacaaagttacagtcgttaaatctttgaggtttgagtgtgtgttttatgggcttatgtgggtggtgataaattgttaaataacatgcaacgtttccttctgattgggagatgtttctggctttggcctttatctgtttttctgtggtgatgatctcccacgcactcatgtccatgacgagtgcccgttgccatgcttggcttatgaaggcaatcagtaaatacttgagtaacaagggcagcgagggtagaaatgaaagtcaaggaacgtttaggcccatctgcgtttttctccaaaggggaaaagtgtaaattgtatcatgcgaaccttcatttcgagaagctgttggggaagctgaagggggtgggggcgtgggaatgggattcctccaacagtgagatgctaagtgtagagaaagcaaatcagaaggaggcagggggttgagggtgagctgaggtctcccagctgtagctaattcccagtctcctcagctctatgtggagacacccccttcccaggtggaggggtggaacaaccctggccacacaggagtgagatacccaggttccccctcctatggtatacaggatgagaatttggagtgttacaggtaacagagggcgtggttgcatttggtgtacttctcttactcttggcatttgttatggctgagttcagactgcccctttcaaatgttacaaccacagtaaagatcaaaggcgatcgaggcctccctgtgtcttatcactaacacatccctggtgtggaataagccccatctgttgagatggggcaaatggaatttacaaaagtatgcttttttttttgatgaatgttatcttgtactttttaattttcatactttttgttctttttttttattacgtattcttctcaatgacatttccaatgctatcccaaaagtccccccaaaccctcccccccacttccctacgcactctcatttttttggccctggcgttcccctgtactggggcatataaagtttgtgtgtccaatgggcctctctttccagtgatggccgaccaggccatcttttgatacatatgtagctagagtcaagagctccggggtactggttagttcataatgttgttgcccctacagggttgcagatctctttagctccttggatactttctctagctcctccattgggggccctgtgatccatccaatagctgactgtgagcatccacttatgtgtttgctaggcccctgcctagtctcacaagagacagctatatctgggtcctttcagcaaaatcttgctagtgtatgcagtggtgtcagcgtttggaagctgattatggggtggatccctagataaggcagtctctagatggtccatcctttttcgcagctccaaactttgtctctgtaactccttccatgggtgttttgttcccaattctaagaaggggcacagtgtccacactttggtcttcattcttcctatctccttgtactaaggtcaaatctaagtggatcaaggaacttcacataaaaccagagacactgaaacttatagaggagaaagtggggaaaagcctcgaagatatgggcataggggaaaaattcctgaatagaacagcaatggcttgtgctgtaagatcgagaatcgacaaatgggacctcatgaaactgcaaagcttctgcaaggcaaaagatactgtcaataagacaaaaaggccaccaacagattgggaaaggatctttacctatcctaaatcagataggggactaatatccaatatatataaagaactgaagagggtggactcaagaaaatcaaatagccccattaaaaaatggggctcagaactgaacaaagaattctcacccgaggaataccgaatggcagagaagcacctgaaaaaaatgttcaacatccttaattatcagggaaatgcaaatcaaaacaaccctgagattccacctcacaccagtcagaatggctaagatcaaaaattcaggtgacagcagatgctggcgaggatgtggagaaagaggaacactcctccactgttggtgggattgcaagcttgtacaaccactctggaaatcagtctggcggttccttagaaaattggacatagtactaccggaggatccagcaatacctcttctgggcatatatccagaagatgtcccaaccggtatgaaggacacatgctccactatgttcatagcagccttatttataatagccagaagctggaaagaacccagatgcccctcaacagaggaatggatacagaaaatgtggtacatttacacaatggagtactactcagctattaaaaggaatgaatttatgaaatttctaggcaaatggatggacctggagggcatcatcctgagtgaggtaacccaatcacaaaggaactcacacaatatgtactcactgataagtggatactagcccaaaacttagtatacccaagatataagatacaatttgccaaatgcatgaaactctaaaagtatgcttttaatttgtgacgttttagtaaatttgatcgacatttaagattgataatagagtttgtgttaggacctttctcaaagtgatagattagttctccctcccgccaattaagttaatgacagccccacaattctatctttggctactggtgtgtttctttccctttgtctttctgggttttttgtttgtttggttggttggtttgtttgatcttgacttgtaggaccccaagaaggagcccccccactcaagtctcgggatgcagggttacccaaagaaacacgagagaccttcttgttgcaaaagcacgtggcagctttaatggcggagctctgggtcgatacgtatctcacgcaggagacagaggaatcgaccctgagactcaaaaactcggggtttttatagggtagggtttaggggctaggaagaattggcacatctggttaatgttcagctttcaactatgctctctatagaaaggggggtgagcaggaggcgctgggctaccagatggtcaatgagtcagccaagatagtcagaaccagttcctgcattcctccccttatccttacgaccgggtgacctagcttcaagacggactcgggcatgcccgggctttttttctttgtagtctcagtcccaggcctttttagtttaaaccttttattttgtttaattttctttcattcccctcttcttctgtttagactaattctaatcatagaattttagagattggtgtcccctaactacctgaactacaggttgatattgtctctgaagaaccatgagttttactgcatcgattctactctggatgaaagccatccctttatttattatacaagggccgaaaactaaagctaagcatatcataaggactggttcagctacagtggaaatcaaagaagtcatccaagatggttgtgactcaaaccacgactcaaatcacccccgttgagcatcccattcccattaccttcgctctaatctttctctcagtttctgcatagaatctctaactatccctgtatgatctgcatagaagcagcactcttctttaagggcagcacacagtcctccttcctttaggaacaacaaatcaagacctctactgttctgcaaaactacctcagacagggaggtcaaagatttttctaaagcgtcaatggacttctctattgccgctaggtcttcattgacagcatccctcaaagactgaattccctgtctcccttctatcaaagctgacactcctgtccccactcctactgccatacctattcccatgaatgtagccagggttaaagtaattggttctctttttgactgctggccagcatagctttcttctaaactggatgcagggtgataatatacgcggggtaacagctggatcatgacacaaaaatcatgagatgaattaaaaaccttagttgatacacagggagtaagtcctatattgcaagcccaccagccaacctgggaaggtacaagatagtaattagcttccgtcctggacacggactgaatttgtctgcataggtgtttgtgggtggaaggtggggtgcctatacagagacctgtactcctcgcggatacttcagtcagggtcagtttttgtcctattccccaagagcaggacgtatggctgctggttctgttgaaatctccattgaaggcaattccttcatagtaaggaggacctgaggacaggcatagccagcagtcctcagtagcacttggatcagttctattaagggcataaaaggttcctctcactaggttaaacatcctctgtcttgttgaagggattgtggaggtaatagttagaggtacttgaagagtgggaggttgggtgagagtgaccatattaagggggtccgcaatcaccggagtaggctgagtaatggtatgggtaaggggtgtggacttggttggagggcctaaaggattgtagagggtctctatttttaatctgatagtgaacaataatccctcatcatatctttccttgtaaatcctaagaccccaggtatacccttttgtccatcccagagctcttttccctggttcagtgaaggtgacaaggagtggatggcaccagtcagtacactcatctaggtcaaatcctccaggtacttaagacgctagggaatagttggctgttactctaatatagtcccagcttgaggagggcttccagcgggctgtacctgaagtctcgcaaccccagctcttgcaaaagaagtcagtcttacttccacatgttggattgagggactgacttcggtggggcccggggcagacatagaagtgatgggtttgaagcatgcttctatccctttggttagagcaaccaccccatgggtctctcaaatgtttttctacatatggagggggtgttaaaggtgccctctgaatgtcagagtacccctccaagtcccatccaggaggggctactatagccaacttacagatgtcagggaaaagatcaggccaccaagtccatacggggtgtaccttggcaattgtccatacagccctacccccctcattgagtacctccaacatttgttgaacaggactgagggggttgaagtcctttgggattgctcctacaaagcaggcgcaacttaagagggttagtagtcttctccaaaatccactcatcatggctgactccaggggttgctctcttgacgtgggatgcgtggacccaagtggggattccttccactttgaccacagtgggcgttgtcagtagcaccaagtagggtcccttccacctcggctctaggttccctgctcggtgtctcctcaccaggactgcgtctcctacttcaaactggtgcggcacctgtgtgtcaccagcaacataggtttcttttagctgttccaagacttcttttcttattattttgagagcttttaatcgagccaaaagactagaggaaggagagaaagacacatccgggcgattcttataccctatggtcataaaaatgggcgggggcaccccatacattaattcaaaaggggttaagccaaggggtccagggatattttgaaccctgaacaaggcataagggagaacggctgtccaatcacttccgctggtctccagggctattttagttagagtctcttttagcgtcctattcatcctttctacctgtccttccttctgccagccttaaggcttgaattagtgtgataagttccgctttttggtcttatataccctcctgcaagctgctggcccatatgacagactttccatccactactgctgcctcagccctccgcttaccttctaccacgaagctgctaccattggtgaaccaggtcatcgcccctggccatggttggtctgtgaggtctggccagattccagtttcttctgccagtatttcctcacacttatgtgcagaggcctcgtcagcctcaggtagtaaagtagcagggttgagaatggctgggggtgcaaaacttactcgctctgccagtaataggctctggtagtgcatcattctggtgccgatcacccagcggtccagtggttgcctgacgatgctctcaagagagtgcagggccactatggtaacattctggcccatagtcagtttgtcagcatctcttactagcacagccgtggctgctatcgctcgcaggcaggagggccatccgctggccacagagtccagcttcttttataagtaggctaccaggtgcttccatggccccaaaacctgggtaaggacgccccttgccactccatttctttcatcaatgtataggataaaaggcttgctcacatctggcagggccaatgctggaacctgcagtagcgcctgtttgagagtttgaaaggctagctgatgttctctggttcaggtgtactctcctttttctttggttaatgggtacaatggggctgccagagtggcaaatccgggaatccagagtctacaaaacccggcagtccccaggaactctcttacctggcgagcagtggttggggccgggatctgcataacagcttgttttctggcttctgtgagccaccgttgtccatctctcagaacatatcctaagtaggtcacttctttccggcataactgagcctttttagcagagacccaataccccagcttacctagctcgaccaggaggatttgagtcccagtttcacagtccttgcgtgtttctacagctagtaggaggtcatctacatactgcagaagagtcacatgtgggttactggctaggaaaggggcaaggtcttggtgtagggcttcatcaaacaaggtggacgagttcttgaatccctgaggcagcctcgtccatgtgagctgtccggctgtccactctcagaatcttgccatttgaaagcaaacaaaggctggctgtttgggtgtaacctcaaacagaagaaagcgtctttcagatcaaggactgtgtaccatgtccgagcaggtggcaaggtgctgaggaggttataaggatttggcaccatagggtgtatgtcttgaaccctcttgttgacttctctaaggtcctggactggacggtagtcacaggtccctggtgtttttactggaagtagaggagtgttccaaggggatttgcatggaccaaaatcccttgttggagcagcttgttgatttgggggcatataccctcttgagcttctttgctcatgggatattgtcggacccctataggggtggccccggacttaagttcaatcaccacagggggaacctgtttagccatcccattcctcctgtctctgcccacgcctgagggtatcgattcaaacagtcctgtaatccctcagggggcttcactttattttggtagagtcgatattcttctcctagttgtaaagttagctctagagtctggggcgctttcattccccaggacatctctggtaattgagaggtaaaggttatttgtgcttttaacttggttagtaagtctctccccaataagggcataggacactctggaatgactagaaacgaatgagttactcgatttcaccctatgtctactatttgggatgtggtccatggatatgacttttgtcctgtggccctgatcaccaaggttttttcgtttttcttcacttttcctagtggcgtcttgagtactgaaaattctgccccagtgtcgactagaaagtccacaggagtctcctccacttctaaggttaccttaggctcggggaggggggccgagccccattccccctagtcctcatcttctccaagagaaagcaccttcacctcttgcttcttttttggacagtcgctcatccagtggcccatttccttgcaatatgcgcattggttcctctccaggcgctgtctgccttctctgggtctccttggtccctgctatctcctgtctcccaggttccctaactgtctacctcttctccctttatctctttcttttacttcggccagtatcctagtcaaaaccttttcctgtctcctgtctctcctatcctcatcctcttttctctttctaacttttcatcttctgtttctctcttatgatacactttctctgcctctctaactacatcccttatggtataatcttgcaagccctcaattagctgtaacttctttctaatgtcgggagccgactggccaatgaaggccataatcactgaggccctttgaccctcagacgtggggtcaaatggggtatatcttctgtaagcctccatgagccttttgaggaagactgaggggggatcagtcgctccctgcataacctctcttaccttggccagattcgtgggccaccaagcagcacctctgagaccggccactagggcccagcgataattggacagtcgttccctaccttgtgccgtattataatcccatcagggccgggttagtgggaatccttcatctatctcagctggagtttggacaggctgcccagcctcatctcggacaggtgtttttccgagcctcgaggaaaatcctttctctctcctcggtggtgaataaagtctgcagaagctgctggtagtcatcccaggccggctggtgtgaatacattagtgattcgaccaaccctgtgtgtcctgcagggttctctgaaaaaggagggtgattagctttccaattatagaggtcggaggaggaaaaaggccaatactgtaagggctgcagactatcaggatcggcagggagagccccaataaccctgagggggagtgccacggttgaatcagcaggcccctcagggggcaactcctcgccggctccttgttcctgtggaggcaccccctcctccggccggggcctgaggcagaggtcccaagggagctgaaggttggggctggggagcatatggtggggattgaggggtgtcgggacactcagggggttcttcaatctctggatagatcttggggggttttgtcacttgtgtgctatgttcatcatctcccccgagcggtggtttcagtttctctttctcagcattttcccagatggctaggatcttggtgccagggcagagaggtgggaagaatgggcgaacccacaggggttagtagcgtgccaagtcctcccataccgtgatgtatggttgctggtctgtatgcgaccctggcccttcctgaaaaacaatggccttcacagcccttatggtgggtaagtcaaaagttccttccagtggccaacccactccaaaaacagaaacagaaagtcatccatggctttttcttcactattactgacaaatttcgtcctctagccctaatgtttgtccaatggtccttagtcaaaggagtagacacggtctgtcccatagttaagaataagaataaaaacaacacaatgacagagatggaagacactaagacatctaaacacactcgtctgcgtctggacttatacaaccagccaaacgctacctctgatggagtgggattccgtgtccactccttcgctggcaggaagagcactctctctccttcactctgccaggcaacagccaggtcctcctgactgttccgtaccctgggcacaacctccagggtctccctttgaatgtcttccaggggtgcagcctgcgggccttagggcatctccctccgcagccgtgggtccttacggtcctcaacggcagctgccaaaatatcagactccgaaaaacaaaggcacagactcagtggctgcacaaacacaccacacacatacaaaacgtacctccaaggggtatttcgagtccttggggacccctcaaatcccggacgagcccccaaatgtaggaccccccaagaaggagccccccactcaagtcttgggactcggggttacccaaagaaacatgagagaccttcttgttgcaaaagcatgtggcagctttaatggtggagctctgggtcgatacatatctcacgcaggagacagaggaatcaaccctgagactcaaaaactcgaggtttttatagggtagggtttaggggctaggaagaattggcgcggttacatacgattggcccattcaaacatcagcaacatgattatgagtcagcagagtagtacgtgcaggccggggcgtataaggattctgaagctgggggcttatctgagtcgacattgtatctggttaatgtttcagcttttaactatgctctctataaaaaggggggtgagcaggaggcgctgggctaccagatggtcaatgagtcagccaagatagtcagaaccagttcctgcattccttcccttatccttacgaccaggtgacctagcttcaagacggactcgggcatgcccgggctttttttctttgcagtctcagtcccaggcatttttagtttaaaccttttattttgtttaatttcctttcagactcaagatcaaactatatagctaagactatcttggaatttgctgtgtaactcaggctggcctcatattatgaatcatcatcatgtcttggcctccaaagtgcttagagtgtaggtatatgccaccaaataagtctgtctgtctgtatatatgtatgccactcccccacctcttttgactctctcctccctgcatttctttctttttgactgttttgctacaggctctcctattgcctggactgggattgaactttccctggagctatggctgcccttgagctccggctcttccttcccctatcttcaccctcccctggggttatggatgtataccgaggtgcctgcctctgttttgtttcttgattaaataaaagaaatgcttaacttctgccccaagacagtagctttttggtagttagtaatgcttgaacacagaaaacacagttccttagactttacatcttaacaggttacagtacccaaaagagtggactggaacctttcccttggcaagccaagagtaaggatttaaacacaagagtaaaggatttgggtacatttctgccccttattcattatgactagttattgagaaacctgtggtgtagtagtagtagaactggtatggcctgcttccttgtagagctgggctggctagctcttgaagcatgctcttgtatctttggcttctgtaagaggctgtgaactcaaatccagattggctattggcggagcagttggatcttctggtatttggcagagcgacacatattctgtctgcacagttggtagggtataagctggaattcttggacactgagagtatctccagaccccctgtgagttttctccctggcaagtcttgagtcctttggcttccacactcctgcttgacttggcccagcatcgggcacatggctgagtggaagaactttgtacacagctcccttcagatccttatcagattgctagtttccctcatagaaacccctgcaggtgccacaaccagcatcacccacttgtccctgtcccagtctggcggagactgaaagggactgcaagaattctttctcctgagactgctctcttctctaaggtcttagttgttccactctctctgcctcatcaataaagcacttttgagtagagcatttaccaagtgtatccagcctttccgggtgcttttggaggaggggtagcattgattatcacaagttattctacctcacctggggacaggtatcaaaagttagcatctccttcggttgttactatgattcctcttcccccccccttggtttttttccatacagggtttctctgtgtagccatggctgtcctagaacgcactctgtagaccaggctggcctcgaactcagaaatccacctgcctctgcctcccaaatgctgggattaaaggcgtgcaccaccacgcctgacctcttttttttttttttttaaattaatttattttatgtgagttcactgtcactctcttcatacacaccagaagagggcatcagaccccatgacagacggttgagagccaccatggggttgctagaaattgaactcagtacttttaaaagaggagccagtgctcttaacctctgagccatctctctagccctctatgattccccttaaattctaatattccacttaacatatactttattatgatgatgatgatgatgtgttcgtgtacacataattgtgtgtgaatgtgtgtgtgtgtgtgtgtgtgtgtgtgtgtgtgtgtggtgcatgtgctatgacacaccacgtagaggtcagagaactttgtgaatttgactgtctccgtccactttccaggtgagttctggggcttgaactctgggtcaccaggcttgcacagcaagtgctttaccccctgagcccatcgcactgggctatttcactttttgaattgacttctaaagcagaaccagagtgaaaagctctcaccagtgaagggggtaatgcagagtgttgctggggttggactcagcgttagaatgccttccttgcatgcacgtgaggccttgatctaacactgcaagagaaaacacagctttggatactaactccacctgattattatcccagttctctttcccctcctcttattttcttacttatttgtttttactctatgcaactccctggaggtcagttgcaatcctttattaagaggattcataataaaaataaccagagaagaattaaaagcacctaaatattactaaacttcattgctctaagtttggaagaatgctaactgactgttttttttttaacacatctccataagaagtaccattattatgattaagcagagagcacaagattaaacggtcataaaatttccatgttacttaagaaaggatgcatgtggtattcagaacacactaattccctttctccttctgggtatcatctattgagcactattatatcacatagaacgtgctgtggtttgtattttaacaatttctgaaacaaccctgcttattattaaggatgaggattattaaggattgttaaggaaacgttgcttatttttatattgctgggactgatacccaataaaagcaacttgaagggggaaagaattgatttttggctcatggttttaaaggcacagtttataacagcgaggaaggcatggcagagttgctggtgaggggaacgtatggaagaggctccttgtattgtggtggatcaagaagcaaaaagctctggctggaactagaagttgattctgctttcaaggttgaacagcccatgtctgctaactggaccacaaagttctacaacttaccagaacagcgccactagcctgggaacaagtgttcagatataagagcccatgacggacacatcacagtcaaaacatagcagaggatatggaatctaaagttcccaaagggatgggatgtagtagccagccttgtacttccatattagaaggacagaatcaagtttgaaacatagaatttttttttatttattcttcttccatatattacctcctgactgcagttttccctccctccactcctctttgtgtccccaactcctcccttccccagatctcctcctcctccatttcccttcagggaagagcaggcctcccagagatatcaaccaaacatggcaataccaagatgcaataggactaagtcaaaccgtcatgccaaggctggatgaggcagcccaatgggagggaaagagttcaaaagcagggaaaagagtcagagacagacccttttcccactggtgggagtcccgcaagaacatcaaactacacagccataacatgatatgcagaggacttagacccatacaggacctgtgattgttggttcagtcttcgtgagcccctatgatctctggttagttggttctgtgggctgagttctcattgtgtcctggagccctctggttcctacaatgcttcttccccttcttctgtggggtttcataagctctgcctcatgaaatatagaattgttacatgctgaaccacaagctgtatctcctataacttcacagcccgtgttatttctaacccagttgttttttgtttgcttgtttgtttgtttgggtttacctctttgttgggacaaaaagcttgctgttttcccatctactggttcatgtatgtaaccaggaagagcatgccatccaatctgtaactccgtaccctaaagcccatgcattcagattttctttcctgtctttaatatttgtttctggaaactatctattcctaagaggatatcgaatgagggaaagcagtctttgtgaaatagacccatgtgtaacaaacccagagcctgaagaaaatgactgacctaataatagtcttgcttgtgcactgcagtgtgtggggagcaaggcccaggtgacaccgttgactgggcttcttctttctagaactggaagaagtaggttgaggtggcctgagaaggaccagggctgagaacactggatttccgtcatggttacgttggtcgtctgtgagtttctgaacgagtcagttcacctttctgaggattacaggttctgatatcgagtatggaactctagggttcagtgagttaaaatttcttccctggatctaaaattttgtagtcatagatatatctttagatcattagactggcttatgataatctgaccctgataatctccctctatcaaacgtgtacctggggcgagccaggggtcatacttctgtgcttagacctttcatgtgccctgtgttttcctggaagccgcatatagcatactcagtgacaggcaggccatgggctggagctggctgtcgggggtaaacatcttggaacaagcaatgctttcagccttacagccttggctcgagagtatgagaagtaagccttgggaagctgggacctggtggcagctgtttctcctcggtctgcttgccaaccctactggagcttgggatggacagagttctcagctgggcctactgtggctgatgctggtagttttccactctgggaaactggaagagtccgttggcatctctgtcaggagattggtgggtagcggaagcatccggaaaccaccaagacaactcagcaagcatttttttttttcctgcagtgacttttgcttcctgtgacaggctgctctctgtacatatttctttatatctcaggatatggactgaataggggagtgtaatccagggaacgggcgcgggggattggaagaaaggagtcctgatgtctaggatttgagccaatgttgcagttctgtatcttcccaaatagctgagatcccttccaccagttacccaaaataggcacattcaataggaaaaccacaccggggctgcagagaagcgccacgttgggttccctgggccaaggcttcttctggttccaacgacccagcgggatgggtaaggctatccaagatcagctcgcactcttcctctgcccttcccgtgaggcccctgggaacactgaatcatggagaaactctgcttacttattttatgttacattgctgctttatcaactcttgtctctgacctccctgtcttcaaccttgtagtcctcggacctggtttctagatcaccagcccaactcccattgttgtaggatgactgaaaagttggtcattctttatctggggttttgcatcccttggtttctttgtgtagtcaatcacagtctgaaaatattagatggacaaagtcaggactaatttataaatcttaaatgtagtgattgggactgaaagaactaaatcttgagccccccccccctctgtcacacccagtgcttgtcattcactgcactttatctctgtatataagcaccgtttcgccttctggaggcaagtgggtgtggttcaataagatgggagagaggctggggagatggctcagagattagaagaccttgctttgcatcatgaagatctgcattcagatcccagcacccacagcaagctgagcatcccacagctgcctgtaactccagcccagaggcattaaacactcctttcaggcctcagtgcatgcaagttcacacatctgcatacatatgtgtgtacacagacacgcacacataaacaaaataaacagttaataaatatgtgagagctacattcacataacttttacttgggatatcataattgttccattttattattaagcattgtttatctctcactatgattagtttctaagttaaactttattatcggtatgcatatgcagggaaagacaaaagagcttgtagagggctttgcactatcagctgtttcagccaaccatcagaaaatatccccttctagtgaatggaaatctacagtgacccttgtggctcagcacctactctgacattgaactgtgagtttacatcatggaacagaacaagattcttgtcatcccttaggtcgctagtcactggaggctcttctaaccaaacacccaaaactcttcctcagtcgatctttgtgactagttatccggcagtgctaaggtctatgctgtggcttctctttgtctcctacacataatgtacacccactgttgaactaagtcactgcctgatgagagacagttgggcaagctgctgcctcacaaatacttgctgaaccccacagatgacaactcacttggggggttctgacctagaaagcctctactgcacttgcccttcaagatctaacatgtgaagtgaattgtttccattcttctgtctggacatttccatctatctacctagctctccaccttttcctacttagctgtttgtccagtgtatgttgaacacctaatcagagttgtgagtcagcaaggctgaaagcggccaggaatccaatatgatgactatgctctggaaggtcaagagatacaagtgtgctagaaaattcacagtgaaaattatttcttagaagaacctgtcacttgcatcctgacaccatattttagtatttttgatactttgtcagactctctgagaccatgatagcaactgtcaaataggaaagcaactgtatctttttgatgtctgaatacctgttgtctaccatttgtctcttggaccataatggaggtctaggagagaaatcattttatgacttattcactactgactgattgtataaatgcaagaacactcactaatgggcacatttgttaatgctatacgtgaatggatagattgcaataaagtaagcaattctcggatttatggggaatccttttctatttgttatctgcgtgactcaaggtttcccttggatgaattcccaagactacatctttaagtctctgggaagaactcagcagtcctctgacactgcatagcagagtcctatgtggtctttctctgtcactccctctgcctgcctgtcaggcacacttctgatctcgtttacttcatttttctatatctgttaagtaggggaaaattcttgcacggagccaattacaacatgacagaaaaaggattcctagaaatacaaccctaccgagatgcattgtagtggcagtggcagtgtcttggttattgtcccacagaccagcaggccccacgatgggaagttatttatgatactatcatgactcaccttgttggctgttcccaatgcctggcttacctcatgtgtcccagaggacagaggttctcgttacatttacagccccacatctggacacatgtgatggatgggactgtggatgttctatgctgcagctgtcagcagggcccctgagcgtcattctctgtccaggatggatgggatctgggagcggacctcagagcccaaacccacagcaggataactgcatcttcaccaacatgcagctcctgggtttagttttcagatatgctagagttacagtcgcaaagatcttcacatgtaggcagcaatcaggcaagagtctcagggccaaaatggaacaggaaaagcaaagatgggactaactcttgctctcagtgaggtgtgcttttcattgtcagttgttcagagcacacttcaggttcttcaggctttggagatgagggtctctcaggccttcagcctcctgcgggagctgtagtggtggcttctctttgcgttcatttgctcacgacctggactgagcagcccctagttctcctctctctgcctcctgcagatgggcccggaggtaccattcagtgtcagtgtgtgcgtgtgtgtgtgtgtgtgtgtgtgtgtgtgtgtgtgtgtgtgtgtgtgtgtgtgtgtaacatgagggtccaatttctctcttggaaatatggatatccaatttttttcagcaccttgattgacaagactatgctccccgccccctgtgtattttttggtacctattttgaagatgggttgaccttatatatgtgaggttatgtctgggctctccattccattgcattggtcacatttttaagtataggactactttaattactacagctttgtgatatattttgatatctaaactcctaatacctctaggtctgttctccttttaaaagaatactctagggttttttatttgtttgtttgttattttgtggttttatatttctggaaaaatttctggctttccagaaacatccattctttcttttccttcgtcgtaatgattccatttcgtttcattttcctactcatcttttatcgcgtagactatggtgacttccgagtgtttatagttacttgttttgtctttgtaactctggaagtccactcaatcttgcctgagctctcactcctttgctgtaactgggcgctgtcggggcgttgctggctcctttgtttcccatctctccaagatggtggtccattgttgtctggtgcccattgtttgaaagctggattatttcccatagggaatttcatacgctctgtcttattctctttgttgaaagtgaagcccatccctgaaactactgtttctaacaggaccagcatgctcagtactaacacgggacagtggattgagctgtttcacagtctcatacaatctgctccttagtaaaccagagtgcttctacccatctagggctacctgatggctacaaggataatgctacttttaggaaattgatttaatatgtaaatctgatagtaaggaactaaggctgggactattggggttattactcaatacaagaagaaatttgcacattaaattatattacattagtcagaatttgggccaaaatgtaagtttggctgttggttaaatcttggaggtatttggatattaggattaggaaaaagctctgtagcatcagtgtggctggacttgggtcatagagggatctaggaagatttcaagtcccctatttcctgttctgttaccagtttcaaccttcttggggactctggactaaaactgaaagcacattctctgttttctctctgtttcctcgttccagccatatgccgctatcctctgggcatgtcaggaggccacattccagatgaggacatcacagcctcaagtcagtggtcagaatccacggctgccaaatatgggaggtgagatagctttgtcaagaaggcctaagtgccagggggaggggagcagggggaggagggaatggctacacagccacaactcaagatgctgggggaagggctagtgctggtgagagcttgcaagactggaagcgagatgtgaaggggtttgtgctgcttggaatgtttcagagagaggcgaagccttggctgcagtcactggcctggaaacctcttcccaaccacagaggcctcagaaccacaccacccactgtgaatggggtcattgataggcagtggatttgctttaccggacctcactgtgggccgttgtaggagaaaggccaagggcgcaggtacagagaggtgtagattatgtaggacactggcagtgagtgatgcctgcgtctcaggaggtatctgaaatgccactgggcagagtgtctatggtcaaaccagacactgaggtttccagtaagttcttccttccctcaaggaaacctcacacagaagggccatcctcatctataaacagagcaaattctatgtggagtatgtaattcccaaggtccctaaatgaacagactcccaactcagaagctacgctgatgatcggacccttttcttcctgctagaacctaattatttgatgtaaatttcgtattgattttgttaaaatggaatcacacatgaggcaatcgacccccataacctccctcatcatacctgtcttagtgtttgagaggagagagtagtgtggagttatggggggaatgagaaatgagtgggtaagctctgcgaggaaagggagtgtactagggaagagggagaaaactcagagggtacttcaaataaaccttagagtgatttctcaatgccgttcagtggcggtctagcctggagtagtaaatgaacccaggttattggtcattccctcacaggctttccaccctcaccttcaccatggctcccatggcttttgctgggttgccatgcccattctgctggctagcattccaccatactgcatagcccacactgaagacctacctttcctccctactccttcctccctcctataacttgatacccaaaccaggaggagcctgctctgtgagattgtggctgaggaatggacgtggacagggtgaaagaattccacagaggagcatgggtggaaagggtttcatttccctagagttctctaaatcaagattaaaaggctacatgtgctttggaaggccccagctccattgtggtgactctccctgggctgtgtggtgcttcagagacaggaaacgaaccacaaatgggaatggttaggacagacagacaccatggggaggtcccccaagtccctctggactagactgctggttttcactctctcctcaggcgcagggcagctgcctactgtgagctggtgagtgtctcttgtttcacagttgctccctctcttccctacccttcttctcaaggctggactctgaagaaggagatggagcctggtgtcctgagattccagtgcaacccgatgacctgaaggaatttctgcagattgacttgcgaaccctacactttatcactcttgtggggacccaggggcgccatgcagggggtcatggcattgaatttgcacccatgtacaagatcaactacagtcgggatggcagtcgctggatctcctggcgtaaccggcatgggaagcaggtaagaagaaaatggccacgctttgggggaatataggactcaatagttgtcaatagttcaaactgtgtatgttcaagcccgatatgacattgtaaatgtggcatggtgtcagttcagagttgacacagaggatctgttagctctgctgagagagttgagtgactatattctgctcatgaacaaggagcaaagtgtccatcaaatgcatgattcatgaagaaaggtgaacatgattttaaaggtctctgctccttctcatatctctcctaggtgcttgatggaaacagtaacccttatgatgtattcctgaaggacttggagccacccatcgtcgccagatttgttcgccttatcccagtcactgaccactccatgaacgtgtgcatgagggttgagctttatggttgtgtctggctaggtaaatctcgaccacagagaccttctgaaccatagagaaacttccaagccccaagaactaaaaaccaccaactcagaaagggatgaaatcactcccctttggaatgagattatttccttttggttaaaagagaagaatgagccacacccatctacccagggcttggtgccctgtggtggaaatgacatattcagagttactcaggtaactgctgttgtggtgagcttcccaacagtgctcaactgttaacccggattgaaacccagtggacatgatggacaagctcatacttccttggaagcttaagtagctccctaggctaattggttaggcagcaggtgcatctccttatcacaaacgctgaccactgtgtttcctttggcagatggcttggtatcctacaatgctccagctggacagcagtttgtactccctggaggctccatcatttatctgaatgattctgtctatgatggagctgttgggtacaggtaaatactaggagatttaaataaccaccagaatagaggaaatggccataacaaatattccatcaataatcaaagagtcagtcaatccaccagtattctgcacatgtgtgatacacggaaataacttagatgtagttatttctacatctacatatataaactgcatggtgtttatctccattttgaagttgacttttggaaaacaaaatagtaataccgtagacaggagaaaaattacacaaaggaatagctaaactttgtgatatttttataagtgtgggagttatatatcctgaaatgaggatgtatattccaatctaaaggctaacttggctatagatacaaagtaagaaataagattggtcaggtcacaaagttaagaaacaatgaactccataaatatagtactttagaagctgtgaaaagaaggagctattaaggcttgcaatagataagagaagctcttaggattagatgttaatgaaagcaggaaacagtaggtagaggagtggagaggaagaaatggaggaacattggtctaattatggcagaaacgggtgagagcagcagagaggcctgaagtggacagatgaagagctgtggtagaaaaacatcaccagacacattggggtacagagctgggaaagacatgtgcctatccattcaatcattacattcttcttctggtccattgctaatccttgtctttcttagttcagtgtttatctgtaagaatattgtgaaatatcgatccaacaataaagtttctaggggccaaaaaagaaacatattagtgagtctcaggaagcagattgtagaatgacagacagcctttctactggctcaagggtggagagtgaactatctccttcatcagccagcccctgggtgaagtctcaattcatccagtcttctagccttacttatttcctttccatctgcttagtcagtcacttctctccactctcttacatcatcttcacattgtttgactcagtcacaccctagctagcctagacctaaagcacacaggaaatgagataccaattggatctttgctagtcagttgttatgtgtgtagaagttggctaggtgttgtgggtaattaagaaaaatgaagccatgggtctcatgcttaaggcattcatagtttgggtcaatggctatgtgagaagattgattattctatgtatttgttgctttttttcattgctatgaccaaatgcctgacaataaacaacttggggaaggaagattccatttagttcacagttcctggcaggagaaggtatagcataacaatgttcatggtggtggagacttgaatgctaggagtagtaagaaggatatcaagaagtcgggtggggatggagcagttttccttttagcacagtaatttccttttaatatagtaattcattgatgatttttaaagttacggaaggatgtgattggagctgagcttcaggcagattaaacaagtagctgacaaagattagatgtgagttctagtggggcatactttaaaatcccagattctatgatgtaaatatgaactagtagccaaggccacaatggtactcttggaaataaaatagggaagaaatgttcatttgggggattacaagcatctaaatcaaattaatattaccctaatgatctctttccctgaatcaatggagaactcagtttcacatcaacaaatgttataaaataacgagtgtttactgcattagcagaaaaaccattgaagtgctgttttattagtttgtatgacaagccttcgttttccccttgtgtcttttcctatatgtattaatatggtgtcttggtataatggttcaccattatcaatggcatctaaattagttcattagtgggggaactaatgaagaacatgaagagcacagcccttgacccatcagtgaccaatactggttggacgcatttgcatcccttcctggactgcacaattcagaaaaggaaaccactagataaggtgcatttgaaagatttctcctaatccctccacctctatagttatcagctctttcaaaatccagcagtgaagcaatgggctgaaaagttcttctgtggatgtgtgagtaactccaggcttctctcttctctcctcttcccatggcctgagcagcatgactgaagggctaggccagttgactgatggagtatccggcctggatgattttacccagacccatgaataccacgtgtggcctggctatgactacgtgggatggcggaacgaaagtgctaccaacggtttcattgagatcatgtttgaatttgaccgaatcaggaattttactaccatgaaggtcagtggtagattctcttcaagaacctcaaaattatcgtgttggggggaaaatgcccgatgtgccctgagctgatgttgacagaactagattttaaaatatattccactactacaagtatagatgaattcagagtaacatcacttttaaaggttgtttcttcatttgttaactctgcacaacaggttagacccattgttattgagttattctcttcttccctccttccttccttccctcctttctttccttccttcctttcttcctttctttccgtctttccttccttccttccttccttccttccttccttccttccttccttcctccctccattctttccttcccaacatcagagccaaacattttcatccaatcagacataacagttatttcatcagtacataactgcagaacagttaagtggacattggtgagtggtaggatggaagccaatggcttggtcaaggctgcgctagaaggctgtcatgtgatgggtcacctcaaatatgaatatgtggcaagatctgaagaaggaattttaagtcctagatctcattttgcctgaagtaagaccctaccagggagccaaatccttatgccacccttgataaggtctttgttataacataaagggtttcctggtatgttgtttaaatcattattttcttttgccctcattctatccttggtctgttttagagagaagggcatgggaaagaagaaaagttcatgcaaaaagtaactagattggatgctaaatctaaattgtagggttagggaaaagtagaggccaggggtgtgaaggaaagcctttgtgttcaatgtaggttgaggctgcaggatcttatatggtttgtatataaactcctaatggtctataaaagagaatgaggaaacctcaataaaagtctcaggaaagggtggacaaataaatttggtcttccacgtgcatgttcacctatctgcccctttttcatatttatattcatgtgtagtagtaatctacaaacttggtaagccttcctcagtagtcttcagtctatagctgtttcctgggttaaatggaagagatcgtaattatactatatatttaaattttatctgtttatctgtgcttgttttggttccacaactatatttggagcacagcatgctagattctgagtaaagaatatttcctatcttgggaaacattggtcacaaggtcagtaggaaaggcaccattaattttcaaaagaatgcatgcgggataatatgggacccagaagaaggaaatatacatcagtcattattaagggttctctctagggcaaatattttattccttacacaaactaggcttaaaaaaatacttgtcttttatattactctcagatgttaatgcctatctcttaaccagattaacacttattcattaaatgaacaaaacatttaagatgaggacagaaggaacaacatatgcccactctgttggtttgttgttggaaggtctttggcaagtgtaaaacatatgggtgtgcaattacatgtaacacattattcttcagagatttttgtagatatgaagtaggaaggggcaaaggaaggagtatgcatagcaacaaaaatattcagtaagagaaaaaattatttttgtattactttttaatatacctgtgaacatacacataaatttgtaagtttatacatgttggggaagatttgtagtttaacaaataattaaacaaattttaaaactatctgggatcttataacatctcaccagcaaactttgatcttcctgaatctccagaactccttttagctcattacagatcaaaatgattcaagagtttagatcaagaagccagaagtttctaagtaggagatctggggcagcctcttcaggcaaacatatcctccacatggtttaattttcatggggaaaaaaaagtgaaaaattactttcagggaactaatatcttttatagagcaggtttctttctgaggcaaattactcctcatctcttgctttgaagaagggttaaaataaaccattaaagcttactcatgcattcaaagtatattattttaataaataaatatgtaagcccacattggaatgaaatccattgctatttatttgcgttccagaagaattcttgaaccatctgtaggaaagattattaccttccctgcagggtacttacccaactctttgtagatttcagaacatctgaaaaacctattgaagctggagatggtatttctttgacgttttttgcccttagcctcagtccatcgacttggggtcaataaactaagatgattacttcactccaaggaagatattaacacatgggttcatcaataaaacctgtggagaaaaaaaaaatcccaatggaaaagttaaggtgactgctacatttctatgtggtatgagggcattgtaccagatgtttagggctctccttccaattgtgttgcggactggacataggtcaggaaaacacgtgagtactcctaccttgtcagtacatagatgaactagaaggtttctacacccttcagtagctctcatgatctacccttagaatatcccggttccagttctctgccgtgacgtctctttcttcattactcttccttcttcatctaaaaagtgaattcagcctggtagtcctgcactgcctacctagaggacttacagagttgcacacagtacaacccagggcttaagcaggcctaagaaacgggaactacagtccatgaatgacagtcacgcctttctaaccagtgaaattcttgagggacaatggccaggaaagatctgttttccccattaagactgagtcagagcaaatggaaccaaattgctgtaagggccttgagtcagttgctaatatacacattacactttttttgtggggtactgaaggactgttgtgaaatttctgctcttgatgacctcacaagccaaaaaaaagatcccgctgaaaggtcatgagtcaggagagtaggtgctagctacctcccacctgacttcttgtctcatctcagatattatcagtgacaaagatctgatgctcccatctgagcggttgtaaattaaactaaatttaagtctgtgtctctggctgaaagtgtcagtccatggcattccaagcgagattgtcataaagaaagatgaaattgaatttgcttgaatattattttctttcaagtttcccacattgccttcctgaaaaggaatggtctgccttgggaaggtacctgggaggaagcaggatgctaagttggctcaccatctcagatcagaatagctcaaatatgggcagatagcacgtatgattaaaaagattacagagccaagagaattcctgttgggaacagacctgggaagatgctaatctagctctcacttaacaggtggggctactacagactaaaactgtgaaccaggtgaccagagcacacagttgcaaattggaaactgggttttagaaggtctgacctgggtatcattgccactgtccagaagactgaattatgggtagtgtttagagaaatgggcaggactaggatttcctacataacccagaagggccagcgtgtctctttgacctccctctctctgccaggtccactgcaacaacatgtttgctaaaggtgtgaagatttttaaggaggtccagtgctactttcgctcggaagccagcgagtgggaacccactgctgtctactttcccctggtcctggacgatgtgaaccccagtgcccggtttgtcacggtgcccctccaccaccgaatggccagtgccatcaagtgccaataccattttgccgacacgtggatgatgttcagcgagatcactttccaatcaggtagaaaaacctcgggggctccacagggaagagagtgggttgatgcaggaggtaggaagtgcatccgtgctgccccctgcccaggtctctgagaggaacgggtttcccagatgccttacaggttttggaaagagagaatcctttgtgtttcttgttttatattacgtaattataagaaccagagtggaacagtacaaactttattagactctcttacatgtttgtctagaaaagatttatggcaaaagattgttaaaatgtgccaaaagctatacaaattaagactgttaatgggaagcatttaagtactaccaaagaattcaaataaaaatccctagacattatgtacaaaagtaaagacaacaatggactcccatctctcacctttattactaatcattgtcacctttgttcattctttcttgctgtggtatttgaaaacaaatctgaaacatatttaggtttattactagcactttggaatgcatctaaggaaatattttcttgagtacaatgtcattataataactcaaaatatttaccagtaacttctaaaaatgacttaatcgtctttgagtaaacagtagggttcatggaaaccctgtgctgcgccatgccttgaaaagttaaatgggatttatgacttcatctatgccattggattttagtttggatgacaaaaaagtggctttttagaattaatctaaagtaccaccaagcctaaccaatcaggaagagcaaggaacaaaacgatgggctttcctacatagtgacaaaggcgtgatgctgcatccggcctgaaagaaaagtataagcataaaataaaatgatagggagagagagaataacctagctgtgggttagaagataagatcctttctgccttgagtttttgtcttaattttggttgtgagcttagcctttaatgattgagccatctctccaaaccctggcttgatatgtttctaaagaagaaaattccaagatggtttatttattagcctatgctaataggataagagagtgtgtatatatttagaaagcactggtgcctacatgctgtctatgccaatgtaatttaaaagcaagcagactaattagttcatgtaatatattcagaacagaactgtatatgctcaaaagaggcgtgcttaaattgtaaaaataatcagaagataaataaatactatccctggagatcatctgggtgaaagaaaacacagatgtccacctactggtattcttggctattcttggcagagcaatccaatgaattctctctacatattgttgaatctaggtccttctttccatgcatattttatgatgatctatgaccacagctctctgaaacaccatgtgctaatgttttatattctcataatatctaatatttacatttgtcttattttggccaagcacagcttggactaagttttagattccttgaattctcttaagcttcaaactgtatgtcttggtaatgttattttcttctcgattcttaagaacttaaattaacacaaatagttgatgccagaaactccttatttgtataataatgctaagaagaaaaagtaagatttgttgaaagaatatcttgtagaagacaagttcatattttaattattgacaaatcagaggtaaaaaaaattgattaccagtgtccatatggcaattacacttttgaaagccagagcctcacagtaaagggcacttcaaagacagttttctatctctagggatggataaagccttaagctgagagttagagcaatgaaggacaatgaaaaatccctttagaaaacaatctaaattgttccatttctttattgtttaattgattcaattcttgggaggaaagactgtcttcatactaggttgatttcatgcccatatatccaatgaattctctctacatattgttgaatctaggtccttcgttccatgcatattttatgatgatctatgaccacagctctctgaaacaccatgtgctaatgttttatattttcataatatctaatatttacaacaattgtttttgcactaggaaaaagtatctttacttgtacaggtagttatactttattaaatgtatttatggatttattcttactttgtttttcatagacattatacatttttgcatttacatactgcagtaaaatgagttgatgcatgtataatttttaaaaacactatcggtaacccagtacattgacttttacaatgtactatgtctcaggctacgttcagatgtgccattgcctggctgtctgttcccagtctctaattcactcttgttctgtgacagatgctgcaatgtataacaactctggagcccttcccacctctcctatggcacccaccacctatggtacgtgtgattagtacttgtacaatagtaagatgaagttacctcctggaagacaaagaagggtagagattgcaactcttcactgtgtgtgagtggcttgattccatgtgactctgaatggatacttgtgtggtaaaggaaggacagtccacccccaaagtgaaggacccaaagttactctcatttgtcaccatccatgagttacttcagctgagaggggcaggatctagagtgttacaactcttccatgaatgattaagaagcttgggggtggggggggaggacaagtaaggaggcattcctaaatgagacccatcacaatgatctcatgaacaaggagtccatggaacaaaatcttttctatctcgcagtagatgaatatgcaaaggtacattctttgcttggagaagtcactggctataacagccggcaatctggaaacatgtttgattgggtttcttctgagaggaatctcagctcctttgacccatctccaagaatgaagagtgcaactcattcctcacctatactttcatgagcattaagaacctattccaaaccacagagacaaaatgtggggatgcgtatgaaaaccgctcactatttagtcggagacacagagagagggaaggcggtgacccatggaagaagattgtaggaaataggagcaaggtaataagcaggagccaaaaaaaaaaaaaaaaaccataaatatgaggatggaaccttctggaattctcctgaaagaccagggatggtctccatgctctcctctattccccactgctctcatttgccctaggaagtgaatcttttctctgccttctctaattggtcacagatcccatgcttaaagttgatgatagcaacactcggatcctgattggttgcttggtggccatcatcttcatcctgctggctatcatcgtcatcatcctgtggaggcagttctggcagaagatgctagaaaaggtgaggatttgcagtatgaacaggaactgtgtgtcttagtcagggtttctattcctgcacaaacatcatgaccaagaagcaagttggggaggaaagggtttattcagcttacacttccatactgctgttcatcaccaaaggaagtcaggactggaactcaaggaggtcagaaagcagaagctgatgtagaagccatggagggatgttacttactggcttgcttcccctggcttgctcagcttgctctcttatagaaccaagactaccagtccagagatggcaccacccacaaggggcctttcccgcttgatcactaattgagaaaatgccttacagttgtatctcatggaggcatttcctcaactgaagctcctttttctgtgataactccagctgtgtcaagttgacacaaaactagccagtacactgtgcttccatttcctgtactgccatgacaccaggaacaaagggcaaattctaaaaagttataattggctaatgagttctctgaggtaaccgagaagcatcggtgtggaaaggctgttgaagcgagcccagaaagggattagccgagtctagttcctcattttcagaatgaagattgtggaatctgccttaaaatcttaggaaagcgtttctagtacattaaacctcatcttgggcatttcccatgaagagtcaggtttattggttttagttagggtgcaggcacctgtgtgtgttttcagtatggcgcagttctgacggccagtcaaggttggggtcactcttgatcctgttaccctttttgaccttttctaaacttcttgttcttttgctttttaatgtcagattacttacttttcctggtgctgtgacccaatatctgacaaaagacaacttaaggatggctttattttttatcacgacttaagagaggagacagtctaccacggcagggaagggatggtggtaggaaggaagcagccgggtaccctgtgtcgacagctggggagcagagagagatgaatgctggtattcggcttgccatctccttattcattctgggatgccagtctataggatggcactgcctccattctgggtgggtcttccttgctcagctaaccctttctggacattccctcttacatatgcataattatgcttctgaggtaactctaaaatccatgaagttgatgatggagcttaaacatctctctctctctctctctctctctctctctctccccataaaaataattaggttcattaatacccaagtagtttatcatcatcttaatcctatttctttatgtatttgaaggtcatgattatatgttcctaaattcctcaaattactgagccaaatgacatgaagttttttattatataacatattttaaagatatgttatataatattttaatatgcaaagccttatttctcatgcttgttttttgtttggtttttggggcagtctcctggtatagtcctggctaacctggtgttgtagatcaggatggccttgaacatgctatggttctcctgcctgtgtttttcctgagagttgtcatcataggcatgtattggcacattcagttcacacatgttattttatatgagactctgagtaatggttgcatggattatatttagcttgtcctaatgacataatacatactcacagggcaatctgtgttctatcttatggtttttgtcaactgcccaaaattgatacactttcccaatgatgaggatgaggacctataattctcccagacttcttaatcattaaagaacttcaatggacaatgctactgagtgactgtccacctttggatctatcaaaatgtttctggctttgaccatttctgacaagtgggttcaatggctttgggctgtgagtgtctgcagtgactacaagggagtcattgacttcagagaccaagtcttttaccaaatgaggggcaggacaccatgagaagggtcttgaatctctagacttccttgtttatagagtataagataaagggatcacttcatttgagaggaacaatctagcaagtcacctgtggtcctttctgacctgctccacatccaggtttcaacattggttttaaggatttggcgcaggaatatttcatagaagagaaaatctctttgtatctcacaacgacttttaacatcagacataaaacacaaaataaagccttcagtccatcagcagaatctaaagagttgcaaagcagactacagagcatcccctcaatggcattcatgtttcaaggtgcaggtgggaagtgctaagcattttcctctttcagaggtggaagcacactcatatctaaatgggtagctccatcgtgaacgtagcaaacagggagtttgtggcagaagaaattgcttgactaaggtttcattcagctgcttgaggctaacatatgctctttgaaaacatatttgtgttagttccttgagaagttgatgtaatgtgttttgatcatttctatctgccttacttctccctgaacttgtcctagatctaatgtcacctctcctacccctcccaacttcttatttttcttttttcttttcttttttttaaaaaaataacctactgtgtgtttgtgttgtgctgctcatgtagtcatgggtgtgggactatccactggagggtgatgaacctagcagaagttataaccttcaagaaaacagactgactctccctgagaggagtatttcctcagttaggggtggagtcctagtgtatgctcctactgaatagtcaagtagggctacattctacttgaaggaaaagagaatctacattctctcctctgggctctctctccctctttatttgatctagagtttatcacacttctctgggtctttcttctgaaatttgctggaccgtcttccttgtctgggagaccaaagctcatctgggaagcagaatttccctttgggtctttaactcagtcttttgagaaactctttctaccactgtgtgtagccgtatataattactcacagtttcctggaatggcattctggatttcttgctaggataatatcttttttttttttggtctgtgtggaaaagcttatatacacataccaacagcattactaaacatatttttagtccataacagtttttgttgacacttttgatggtgtcttcagcaatacttctttgagaaagtcaacccatatttagggagaacctactatgttctgggatccatgttcgttctgagtatgttactgcaacaaaggactgttcaatctagtagaaagacctatgattctgtctacatgtatttattaaaatggagcattttacatgttcagactcaaatactacatccattagatgctagcagttttcttttgttggagcaggcagttacattagacacgatgccactgcagctggttatttggtgctttctcttcctgtattagatgtaactcgtcattctgtttgcgggttagtaaaatctagcatgttatgctaaccaataatactagggtgatcagatacactgttaatttagcatgttttagaactcccaagttaatgggtgttgcagtttatgtttacacagatcagagggttaaagcacaagtcgacaaaacccattatttactagaactcacacaactctaaaaaccagagaaaatatttgactacttacaggatctcattgcattgtgtaaatgatgctgacaagtgctccgtggaagcttgtgaatgttgccgacacaggatggttaaagtctgccatctaaagaggaagctattgctaaatttctgcaacacaggaactcatggcaccagcctgcctctctatcagctccggtgttcctggggggttgaaggtatgaaccaagcaggagggctggattttagagggcaagagtgacgatcctctctattcatgactttcaggcttcacggaggatgctggatgatgaaatgacagtcagcctttccctgcccagcgagtccagcatgttcaataacaaccgctcctcatcaccaagtgaacaggagtccaactctacttatgatcgaatcttcccccttcgccctgactaccaggagccatccagactgatccgaaagcttccagagtttgctccaggagaggaggagtcaggtgaagatgaaatcatgggtgaattgagggagaagaagccttggtttatatgatgtaggcataactcttgctacacgttaaccaaatccactaagtctgggccagcctctggagaagtgtacagtctgtctgtctgcttgctgctgcttctagtctattctgacactcttccttttattcttaacacaagatgttcagagggaccccccccccacacacacacacaaagatgtcaaagtgtcactgaggtgttatcagaagaagctgagcagtctcatccagataaccttcttgtcctgtgtctaatgggagagaaggcccattctgtgctcacttgagaccagactagactggaaattacaatgggaggagaaaagagacatgaagccaaaggcattctatatctctggatagctctctagataattgaatggcttaatttgttgacttctctttgataaatactcattacactaatataaggttttgtttttatagtaaatgtgttttggcttttctcaacaaaagtattgaataaggtgcataatgcaaattgcttcaaagcccagtcccccttggaaagtactacagggtgacatcagaagtggtactgggtcactgatggtacccttagaagctgtccatggtcatcagcctagaagtgacaggactagtagtagaggacttgtattcaggagaggaaggcctaagccagatggtgtgacttaatagaaaaaaaatcagctcattagagaagaaacatgctgagagaagaaagggaattaacccaccaaattcatctaattcctagaaacagcaagaccgaagactacatgtgagggggatggagagatggctcagtggttaagagcaccaactgcttttccaaaggtcctgagttcaaatctcagcaaccacatggtggctcacaaccacctgtaatgagatctgatgccctcttctggtgcatctgaagtcagctacagtataattacatataataaacaaatacataaaaattaaaaaaaaagagccgggcgtggtggcgcacgcctttaatcccagcactcgggaggcagaggcagacagatttctgagttcgaggccagcctggtctacaaagtgagctccaggacagccagggctgtacagagaaaccctgtctcgaaaataaataaataaataaataaataaataaataaacatttaaaaaagagaattgaaaatcaaaagaagaaagaaagaaagaaagaaagaaagaaagaaagaaagaaagaaaagactacatatgaacttattttcttaacagaaccaaagaaattaacctatttcctaaggtctacatctcccataccaatcatattccaactttttacaattatggtacatgttaaacatgattttataaattcaatatgaagttattttcttccctaaactggactgttaagttaatggcagcattccaaaaattaaggaaatctgctattaaaccttccaccttcaagaataccatcctgatatggcagcttaagcattcctaaggcttagccccccgaagtccacagattcgtcagggaacttgttcctgatggtgccttgtaggaaacgtgaaaaacaaaatggcagcctaccttcttaagtccaaagggaaggaaggtgcctagagggagcacaactgcccacaaataagtattgtatgcagaggactagactgccgtggggctggttctcactatcccctcaggtctccctatagccctgggaaaccagactcagggcccatgtcttctcagggtgcagtggtgttgtgaagccggcccagcccaatggacctgagggcgtgccccactatgcagaagccgacatagtgaatctccagggagtgacaggtggcaacacctactgtgtgcctgctgtaaccatggatctgctatcggggaaagatgtggctgtggaagagttccccaggaaactgttggccttcaaggagaagctgggagaaggccagtttggggaggtgagttaatctttggaacgaggcccccagtaggtcctgacatgaaggaagtgggcggataaaagggatcagcagaacaagtgtctctctagaagtgaggtctcagccaaagggctcccttacttgtttatctgcattgctattgagatagttaatggtcaatctcatctttgcttaagagctgtggattccctaggacttttggtttttatacaaaaattttaagggaagcgagtcacaagagccccgctatcctgaaaaatacccaatgctttcaaaaactgtttaccataggtttctgagggtgggacttatggatatcatcatctttggtggattatctaggaacaccctttttgcttagctacaatctttttttccctcatattgagggttatatgtcaaaatggtaaaaacaaaacaagacaaaaaaccaacctcgcccttgttttggtcttggaatgaaaaccaccaaggaatgaaatcaccacaaagataaggaggagccctcttctgggttgttctcagagtgattcgtgggatattagacctttttctcttacataagccatcagaaccttcagagaattcagagcagtgctctcagctgtaactggaatccttgaatcctgtcatctaaatgttacatcatcaaatgtaacacacgatttccgtgaatatgtggttgacttccagtatgaatcaagtattctttctctaggaggtttggtgttcgagaagacagagggaccctcgacatttgtctgtattgtcacgtggactcattctgtcccttgggttgaaattctatgttcactatactattgctaacacctaggcaaactttacaacattctcttcaccctaggggattatattaagaaattgccttatgttttatatgatcaagggattaactttctcaaatcaaagttgaagcaattatgtcaaatgctattttctagtgaagttatgctgtgataaaatgctacattgtagtcattccttcccatatcaatattccattcaatgtacatttcttttgtaaggcactgatgtatcatattagctggatacttcaatgttgtttattaattttgacaattacttggttcaatgatatgtcagccataccctcttattggtctctgattattttgcctgggtcataagagtcagtttttctccggagcatgcccagcaagaatactgaggcatctccaggagacaggatgatgctgagactggatgacttttgtctaggttcatctctgtgaagtggagggaatggaaaaattcaaaggcaaagattttgcactagatgtcagtgccaaccagcctgtcctggtggccgtgaaaatgctccgagcagatgccaacaagaatgccaggtctgtggtctgcattttgaattttcctttacttgcttcctggttaggattgggaatattctggaacatttctgagcttttatttttctttcctctctcgagatgggaaggtttcatgagtggtcacacaagcccacttttaggttttatacttcttatgtggccagaagtgcccaccttttcctctgtctctttcaaacacaaatgtacatatttatattatatttactatatacttacttaaatcccctcacccagtccacataacagcccaaatatattcatccctcatgaaatccagatataatcttgaatgtcaccctctcctctggctggcttttcctaatggcaaacaccttcctccctacatctgtgaattctccactctcccacatctctgttctcattctcaccctgtgttttctcttttatgctccttttcttctatgttcagcagcccctcacaaaagagaagctacttctacttggaaacacatccgtggacctctgagcaaaagaatccacagtcctttgacaggtttccaaactggctagtagtctcttggatcctttcctacacacactgcagtttgcagaacactgcattgttctctgacagcctttccattacagtcatggtgagttaatcctcacccagagacgcatgctggtggaaaactatttgtgtctcagagaaacctgaacatctggataccacatgcctcttcccatgtgtgttgtcttgatatgtcttgctgatactcaccctaagaggaagtttattatccctacttccctaaattattgtaaattccagagatgatgataggtttcattgaaagtcttacagtgggcaggatgtggactgaagaggagacgaaggtgaggaaatggaactgtgtgggctttcacattttaaccaaaagctttatcttatgaatattaacatgatatgggatattcttcatattaatcttcttcataggacaggagagagtagcaagtgggggaaaacattgtgtgagataagaccatgtatctctgggttgtttgggttggtgatatttgcagatctatctactctctcttgtttggtagtgatggatcgcctaagttctggatcttcacacatcgccaaaatccatagtctgggatttcacaggaaaaggagaagggagatgctaaatcagaactacattggttccaataatttataccaacagagtttgactctcagcgcagaattcctgtaaaactcactggagacttctgatttgctcctgtagttttgggaatgtgggctattggctccatgttgacaatttacaactcaaatgtggctttcactatgaactcaagtcattaccagtttggcctaaatggctttgaaacaactccattcgaacaggctactaaatcactgtgtgttgtagctgacttctggtccagatagtattgggaaaagctagtaggtgccaaaacaaacaaacaaacaaacaaacaaacaaacaaacaaaacccagataatcaagagggtgattatccactttgtaaaaactgtcttcactttattaagattgtgatttagtagcttttgaaagagacaaatatcttacagcacttgagttggttttaatgagaagctccatttgcagggaaattttaagcaacacatatcagtaatattaacaacattttatatcgtgatataaaagtgcatcacagatcttatctttgaaaacattatcgttgactcaataaagatccattgtgttcatggagaaggtgaatgggatagttctgggtgcctgtctgtctgttatctcagagatgatccagaggggagccaggcatggtgtgatgggtaggaatgggcattgctgtgcatccatccttgctcggttctgtctctgacaacctctgactttatgtacaatcacaccctccaaaggaatgattttcttaaggagatcaagatcatgtctcggctcaaggacccaaacatcatccgtctcttagctgtgtgcatcactgaggacccactctgcatgatcacggaatacatggaaaatggagatcttaatcagtttctttctcgccacgagcctctgagttcctgttctagtgatgccacagtcaggtaaacgagtcaggtcttggtcttttctgtgcagtcatgagagtaactccagggcctgaaaatggggagtggtaaaacttaaggtatcagttgtcatgggagtagtgtggggaatcagtcagtgtgcagtgatgatggggcagctaccctttgtgggaaatcaaacattctatgagaatggaggcagaatatagatggttcaaccctggtttgatgattagcgtatgccctgtccatagctgctttcttttttcttacacgtgcccctagttatgccaacctgaagtttatggcaacccagattgcctctggtatgaagtacctttcgtctctcaactttgtccaccgagatctggccacacgaaactgcttagtgggcaagaattacaccatcaagatagctgattttggcatgagcagaaacctgtacagtggtgattactaccggatccagggccgggcggtgctccccattcgctggatgtcctgggaaagcatcttgctggtgagtttctccatctgtgagccctgtcgcaccaaccaacctgctgctcagggtgaaggtggaacaaactggaggcagcaggaggcaagccccacagaccttgacattttcccctgactagagaggatcttctcaggcactatattattattgttgttttgttgttattgttattattacagactttcctatatctgctggaaaaggggaatgcaccattatagaaactttagggaaaaggtttaaaagaataagaaatttgctatctttttgtctctacccttctccctattggatggttttagttctgggcattaaaacccttatctgttaaaaaaattatgttgtaatataaattttccattttaagggtatgaccatgcttctcattaattatttagaacagtctgtgtattatttagtgacttttaccatttacttgttgaatccataatttttcttttttatgatttttacctaattcttggtgttttgttccacaaatgaatgacttcagatgtctctcttggagctcagtcgttctggccatgtatatctgaggcacttcaatgttggttttacagacactcagctcattgaaggaatgagtattcactttctacaatgctaccttgattgtcttccataatattcagagaaaagtcagagcccagtttgactttgttcatttctacttcatctgcttttttctggctgatattcatataatatggattcataaattagttttgaaataaaaaaaaatgaacattcttgtctcctcaataagttaatgctttggaatgttgcctttgagggtttttttgtgcatgtatttctaatatgtaatgtctttaattttgtatttttaaatattcaattgtatgtgtacgtgtgtgtttgtggtgggtcagaatgtgtgtaaggacaggtggttgcagaggccagaagagggagtcagatcccatggagatgggattacaggccgttacagggtctggaaactgactcaggtcctctggaagaagaatgaatacttatgtctgcctgttattccaattcacggggggggggggatgcactagaataattgctgttagttagacataagcatgggctagatagcaagatcctacaggggaacgccagggccaaaaaatgggaatgggtgggtaggggagtggcggggggggggagggtgtgggggacttttgggatagcgttggaaatgtaattgaggaaaatacgtaaaaaaaaaaaagaaatgatgctataaacaagaagaatgatgctataatatctgccattttataaaaacccaatggcattttcatcgatatatgtgagcctttatctttatcaacttctaacatatgaaatcactttaaaaaaaaaatctgaaggtgctgtgtggttttaaaaagagacacattgagttacattcagaggactgggtttcctagtccagttgttgcatcattaatggacttattaactggaataatttgctggatcactccttttatttttctgatctaaaaatcaataccctctacatgtctctgccactatctttattaaatagaaaaatgtgtatttaatgagtgctgatcacaaccattctcagtgttgtcatttgataaagtcgtcctcaagtctgtggctaccagcaaatagggaatcgagagtcctggatccaccaggactaattccaggcccttataaggcttccttcattcctaccatcaaaatcgttcatttcttatgctaacttgagctttcccctgggtagttttcccaaagtggtccatagcctataggtgacctagcattcagagagctgatagcccagaggtacctgttctgatgctcagtccatggccttacggactatatccttgcagctcttggatttcatgtccaagagaagcaggactaagctgaggtcacagggatggcagagtagacagctttccagtaagttcacatggccacttctagtttctctttgcacatcagtttcagcattgctcacccttgtcaggggaaggaagattggtttcagatgatggtcatggaacatcttctttgtgggcttggcttgctctgactttcttttctccagcctggtctacaaagtgagttccaggacagccagagctacacagagaaaccctgcctcaacaaacaaacaaacaaacaaaacccccaaaataaaaacaaaaaaaaacttttctctccttcaatagggcaaattcaccacggcaagtgatgtgtgggcctttggggtgactctgtgggagaccttcaccttttgccaggagcagccctattcccagctgtcggatgagcaggttatcgagaacactggagagttcttccgagaccaagggaggcaggtatggactgttgcagacgtggacttgggtgctctcaagggaaggagaaaggaaggtcctgactatgtaggaagaccccagctcaaggatggaaacaaaattcaccttcttatattcagtcaattcatagatctagattatccagaaagtcttcttggtggggggaggggggagggaagggtgagggaagtcaatggtgttgtgttttttgtttttgtttttttttttaagaaaaaaaaaaaaaccttcaaataagttatggtgttggtttaggttggtttaggtttctagacttgaacatccacaaatggactggtataccctggtccttctctggggaggtacctttgggcctactgattgatcctctggggacttatggagagccgagccctcaagctcacatggagtcctaattccctgagatactaagctttctttggttggccaagtttttaatgctccagtgagacctaggatttaaagcttgctagtgactagagcattgcagtcccccaaggggtctgtctgtagcgcatctgacatcacagcatttccaagaggcagatagatggtaatagctagggaaaggttttgtaggagataaaaagtgggtcctctctggattacctaggcttaaacaaggaaatgacaaggacagacaagaataatacatggtgcatgctgaaaatgagaacagcctgcaatttaatttttatctcaatgtcctttagataatttggcagcaggaattctaaatcatgcatcctggctaggagatgtcccagttaacgtttctattgctatgatgaaacaccatgagcaaaagcaagttaaggagaagaggtttatttggctgacacttctacattggtgcagaggtcatggagagatgctgctcctcatagcttgctcaacctgctttcttatagaatccaggaccacatgccaagggatggctttgtccacagtagactgggccctccctaatcaatcactaatcaagaaaatgccctataggcttgccgacagccagatcttattgttgaggccggccagaggctcacatgttggcaaacacactttataaagaggggaggcccattcccagccaggcaaagttcctttgaagtagacagatcagccttttagtgggaacttgtgaagatcacagttctgtgctaactcttggagaactggttcagcctcaggcaggttagggctcaggcaggtagtggcacatcaaaggagaatgctgagaagcagcacagcaggtggctccgcctaagtggcagatggtttgaggccagcctagctagcctggaaggaggtaacatcttatggagatattttcttaattaatgttccctcagatttcataactgaggttctctcagatgtccttagcttttgtcaggttgacctaaagctatctagcataggaggtaacatctctcttattgtgataaagcaaagatttgctcttgtctttatgaaatatacaatgttccaagaagaaagccttcctttcctagattaatgtatttaaacaaccctttagaagacaaattccaaattaaaagttgtgtgttcaattagaacatggattcccactcattaaaataataatcttaatttgagtatatcctagattcataggcaaatgtgggtttattgagagcctcttggtattcttcaaattattgtttatcaacagaaatcctgcagagtcagtttttatgtaaactggaccaacatccatgccataggaggaaggccaagtcctttcctgggttctgtttgttttatgttagtcttcatgatattaaaaatgatcactagacagtcatatgttatttcaattctgttatacagctgcacaagaacacatctttttaaccaactgaaaatcatagacattttcattcataataatctttagaactttactttctcatttagtttgagtctatgtgaaaaggaccactaatttttacctacacagatactagcaatgtactacatacagatttgaccatctccctgtgatcaagtactagaatcagggatttgactgaatccaggcccaaagcaaacatgaccatcacatactaagtcacttctcagttacaactcaaaattttggtaaagaaatttctaaatttagcatatcacatgtaaacaacaggttaaatacaattgatcagatttggtaaaatttgattactattgtgtttatagctgaagttccagtattcatgttctagagtttgacatgagcatatatggacagcactgtgtgtatcagctactatgtggcttctatagtccctgagctacacagaggcggtgcactcatttcccaatagttcatccaacctactgggcacgggagatacaagcaagtagatgaaccatgtgacttatgcaaattctagaagaaacttcatagcttaagcaaatttaaaattaagcaaattttaaacaatttatcttcaatttaaaatgcttaaatgtctacagcaaaaattccaaccattaaaaattaatttggcattttttgtgttcaatttacaatctcaaggtgtgaagaagttccaggtagcatttttcttgaatgcccacagtatgaatagaacttagtacctaaaattaaatcagtttaaattgtacttcagtgttataagaggtaacaacatggtatatgtgatatgaaatcatatgaaatgtaacttaaactgttcaagttaaattgttattgctgttgttgcttttgagaccaagtcttgctacatttccagggtggctttgaactctgatcctcctgcctgagcctcccaagtactaaggctacaggcctgccacaaccacacctggaactcaacattactatacctttttttctaaagttctcagaaagagctcagcaatttttttgttttatcagtaatacctgagaatgccggttatcaataatgcttactttctaatgcctggtattttatatccattgttttataatcctgacttaaactttgttgtatctgatttgatagtccagctaacttgctattttagcagaagccaaatatttttgcttattggcctttttactggcaattagaagtcgatgggcatgtgttattattagactctgggtaaagcccagctcctatgatacatgatccaggatggtgttgtatgaggtaaggcaaggcaatgggaagtagctaatgattaactaggtacaaatatcgggttcagcaaaggtaatgatgcttttatggttgagtgatcatggaaagtttaagtacggtttagtaatctgtcaatatagcagggtattaaaatgtataggtaaggagatgatagtaaaaatatagaatgcgggagatggactggcagttagtaaaatagcatcttgcttgtggaaatggtaactggaaacttcagagtagcatcctaggctggaattatggcatcataattatacctgttaatgcaatccaatctcttctaaatgagaacaatacagagaggggaacatggagaacaatggtgagtattgctaggatacagccttcctcccaatttatacatctggctgaatattattccaataaaattgcaataaaacctcaaattctttagcagaagctacaagtgtgctttatttctgtcatattggctcagacaagattcaccctcattgacggcagatctgagttcttttggcattggtggaacctttagtaggaaggcagggtcctcgtgaaatactgcttgagaggactagaatagaagaaggtaataagaaaggggttgatgagctttgtgtgatgggagaatagacacaacacccgtgtcttttgctaagttcagtaaagtggcgagggtacacatagagctatgttacagtccattctcttcctgccccttaatatatatttttctctcttttaaaatgtttgttcccatagatctatctccctcaaccagccctttgccccgactctgtgtataagctgatgctcagctgctggagaagagaaaccaagcaccggccatccttccaggaaatacacctcctgcttcttcagcaaggagccgagtgatgatgcatcagcacctggcagtgttcctgtggcccagatccttcccacaagacctactgctcacccacatctaagccactccagctggacattcaatggacccgagagacagagaattagtcactctgccctctctgtcccttgcctcctccactacacctccccgctccctactattgactcatatatacttttttacatgaaataactaaaagaagaaaaaaatatagagcagatattagtaaaagaaatgttacttgatataccaaatggttagataatgaagactagaaactcagataatttataaaggttatgcttctgtttataagtgtgcagatcctacaatatttttccgtgtcactttctgtaaaatacctttagaaagaaaaacttgaagaatatgaatgtcttgagaaacatgagattaggcttaaggaaaatacttagaggtaatgaagaattgcaggacttggcattccacaacaaatggatgattttctgatttggacgtgactctcagatctctctgtctctgtctctgtctctgtctctcctctctctctctctctctctctctctctctctctctctctctctctctctctcgtcaaagtgagtggcatgtacttaaaaacctctatcttgtgtcttggaatgaatgttttcttcaatcatggccagagatcagagcctacccatgaaacagggcatatggatagaaagaaatgtctgttgtaaggcttgaagtaggacacagaaagggaaagattgcacaagcttcccggtagaccatggtcataggaaagacggtcctcggaggatgactcgcaagtgtactatttgttgttcatctgtgagggtcttcacctgtgtgttctagtgacaacttgactttactctgtaaagcctcaagttttgatattttaatggttgctccatcagttcctcttgtccagttctatatctttcactatgtgatgcctttgtgggatttatagactagggcttcaacttctcaggcacaagtatccaatgtcatgtccaatatacaagagatatgtttagagtgtttccaaaagtttggccaagacccctggaaaaagttataggaagactgatttccacttttgggaaaatatggaaatagaacatatgcaggtgggggttttcccagagatggggaatctctcatctccgaaaagtttcagatactagctgaagaactctgcagggaagaggttgttgactactgggtatatatgtatgggataataaaaggatgaccatttggtgttactgaaagtgcttttgccaaagagagggtggccagcggcaaagcatgaagttcttttctggctttgggattcacgagaactgatgcatgatcaagcaggagtcaccttagtgactaacttagtgaccctaagttttcatccttcacagactctaagattcagcagcaatctacactacaaaacccttaaatcctatagaggaaaccaagctgaggtaaaatagtggtgatctgcttctgtctatccagtcagcttgctccatggtctcttagaaacctgagagcttcttggttcagccttcagcatggctacaggacacagcagatgtataactctaagtcttgacattaatttcatagatcccattcgctcacagcacatttacctcctctcccatggcttttctaccattctcagcaagactaacttcgatcccagaggtaggagagaacattggattgggaactctggccctgtgctgcctcaagccaagtatgtcattttcccaagtcttgcttctctctgaatttgttttcttatctgtctcaaaggaaaaccgaatctatgatttaggaatctcttggagttttgctttgttttgtgcttgctggagaactagatttgtggttgatgtaggttcagttactgctcagacaattgtggccagtaatagtgatcccgagagacatcatttaagtaagagcaacacctgcattatatctcctttagagtgaccagtgctgcttcacgttatctcatttgatagttctagggccagacatgtttctttcacaactcttgactatatactcttcaggattctgcccccagttcactgtattcctttacaaatgaaatttccaggactttgctttatggaactaatctatcccagatggctatcaaatatgtatcttcatgtacaggcactttgtttttggtatgaagaaggttccaccttctggcactgaaacctttgtattacagacacaggtttagtttctagttacactagtagagtttagcagtacaggtctgagtagccaaccatggtagaaggtaaagacttactctgtagacaggtagctcaaatctaaactagggaaatgaaggtaggttttggaaaagaaagcagaaacagatgagaaactgtgggatcttgttatttccccaagtaactcgtgatcacgatatatgtgaaccatttatgtcaagatgtcctttagactatcatatttcaatttatacctttattgatgaatgcatacattaaccaggtccatttatgtttttattattggggatcatacccagaactcacatttgctaggcatgggtcctgtcattgatctatgttcaaatcttgatctggtgaccagataaatgtgtaaccatgtcacatatgtgacctggagtggaaatgagtgcccagaggagagcatgcattgttggagctgtggaaagattgtctgtgaacgctcaaaactgtaatacaaaagagggctgtatgcaagtatgtgagtagtgttttttttttttaagttgttacatgaatgtgtgtgtgtggctggaaggagaggatgggtagaaaataagaaagaaggcacagtgaaaagaggcaaggagaggttctggggaagatatggggtgaggcaagtcaaacgtggtagagaccgggttggctggaggccatgaagtcaatgctgatgcatgccaagagatctgagagaggttagaaaaagtgacttgggaagaatggagggtaggtaaaggagaaatgctgggtgaaggagactgtctttagtaaatcgatgtcaggtacaccgtaggcaatgcaagggatttttgtagagttgaggaaggacatggtcttcatggctatagaaacacgtggccaccagaaccattagggagtcacctattcatctcaggaagtgagtacagaacgcatttcactctcctgtgggttctagaccacatgtagggctggtgacaatgctgtctgcgcactggcctttggtgttccatgtgctgttggggcatgaaggtgtatgagcgtttggtagttaccaaatacactttcaataatgctcatccttccatggtctaaaatggccacagcaaacatggaaacaataggtgtaagttagacaatactaagtttcatctgatctttgacagaggggtgtgccatattggaaacatgttttccacacaggcaccccacaagaacagtgtgatgtgggcgtagaccatgtgttttaagtaaagaggaaatcagggggcgtgtcaggatgaagggaatgtgggaagatgttccgaagacatgcactagaaaacagaacggtgtctgttttcgtccagtactaaatgaaaagaattgcaatacattgcttattgcaatttttatcctaagttgaatccatgagcctggtgcttgcagcatagtttttttgttttgttttgaagcctatgtccttgggcactgtgtggggcaaggccctgatgttttggcaacatgcagattctggtctcctggaaaccttcatattctttcatattctagaaacagatgaatgtcattggcacttggtgaattaattagaatcctgagctaagagggaaggaagctgggtagtgacgaaggacttgagtaggctggcaggaaaggactggggagggaccatttagttgtcccgtgtttttcagaaatttctcattttgcaatgatctgagacttgaaagaagttacaaaagaatcagcaccttaccttggttctgttttccacacactgaaaatatttcagtctattttcatctatttggaccattttcaaaactaaaccctaggcccggcttggctttcaccagttttcctacattgtattcagttgctcactggatacttttagcctttgttggtttgtaatctggctttggtggcatacaggataaaggattctacctagatattactctacaaatgagagaaaacatcaaactgacaagctcttttatcagggaccagtactccagctgtttgctgaacccactttcgattacagctcatcattgctggacccagaacggccacagcgttacacgggagtcatatgtaatgatcagctctgctgtttggccacccaaacaatccaaggacaacttaagaaaagtaacaatataaaaggcttcaaagtggaagggaattgtaaacagaagaacgggacttttgttggtgaccagaggggtctatgataaagcggtactttggtcaagaattaagtggtactgaatggaggtagggatagtttgtggctagactatggcacaaatataaacccctaatgtgaggttaaaacactgtctttggaggaccagaggagcttcattcgcctaactgttcatccttaattgtaatatcagctgctaagctaaatgcaaacacatcagctccctggggaaaagttgaaactctcgtttcttggaccattactttgggtttcctgctagacatttttaagctgccttgcttaagggctacaggataacaactgtctgtggcttatgagattcctagcacacaaatgagtagtttgtgtatgttatatttttaatgaataaagagtggaaaaattatgtatcacatgtgttaatttggggagaagcgctttataacagagggcttactctcaaagagaacaaaggaaaacgtgttctacagacagtgtatacctttgacctctgaaaaaagctatatagtttctcctacagacaccttgccagtaaccttacaggtcttataggagagcagatccaagttgccaggctgatctgcaagcacaaacatttgtcaagggaaagcacaggtcgttactttcagtacaaaatggttctttgctatggatggattctcttcttcttgccccatgtcctgttcccaaggaccgacttcctgcagcactgtggtggactcttctatgaggagacaacatctgggccttattcaatagcctgtggtgggtaatgtgttttgtcaagagctaaacagcaaatggatttaatttctgcttaacatggtcatagtcattctgaaatggctacagaaatattctctgtactagaaaaaggaatggaacgtggtgccaattgtctattttcctttatttattccctgtaagtctgtcagatgataaattgtacataacagtgattaaagagtcatgctactgatacagtcttctttctgtctcagcagtaacagttctggcctttgttgtctttcctcctgacaccactggtggagtggtgatgtgacacagggaaagtgtgcacacggttatcagggatgtctgacagagagtcatgtgaaaaggcttctgttagatgtcagttgacagctaactaacatggcgatgtctctgacatagtagagaccttgtttcatatcttcatgttattgggccacttctgggaacctgagtttccagaattcttttgaaagccttcattgtcattactgtggagttgttttgttttgatatattttttttgaaggaacagaaacacttgctaaatccaaatatggtctgtctcaggcagctgttcacacaagcataaattaacaaaaactgtatacaactgggatccagatgcaaacttcccaatggagattagggaggaactatccccaacacattttactttcacttgcagaattctgagtaacaggagcacacttctcccagcaggtgtcctagtagaaaagagaatgggcatgaattctcaaagaataaacagtattcacgagtgcacttcctatctctgcaatgtccaggctttcaggaccgaagaccaggaatatacctgagcggtggaactggggtggaacaaaaagaaacaaggggactggggatgttcagagatctaattctgctgccaacacatactgccgaggcttaatggcagatatgagtgatggcttgcatctatgcacacacatacacaaacaacacagacaagttatccacatgtttcattatgtaggtcattattgaggatggaaattttgtctattcaatttttcattagcaacttgcatgggtctggttaagttgcagagaacaagaaaactattttgcgtttttttttttagggaagagcgttgaaaaatatgaacatgagaaactacacagccccaactggaagttattcattagtcctgtttgcaaattagaggccgtctattctgtgaatgtttctaagaaccaagaatagaactttgtactcagagcaaaagatatgtctctcatccttacctactgtcccctaaaaggaaaagcgatcacggtctgactttagggtagagatggatttattacaaggagcacaattaatgttgagttaactacacctgctcaactcatgccaaggcttgccagtgatagcttcactcactgtgcaccagactgttctggtacccaactgaagaaccccaggacaacacaaacccaagatgagtagtttggagtgaggtaaaaacaaaacaaaaccaaaccaaaacccaacactcacctatgaattaaaaaatattttcattgctcggggttgtgactctctatgacaaatgactttaaaaattaaacattttagattaatagtccagtccatcccttgtcggtcacagagccttggaagcagcaacttgagtagaacaaaaggaggaagagtcccagtttcccttactgggctgggctggaagtgatagaggactttctctgaagtcttctgggtttcatttaactcagagctggtcccacacctgttctcatctgaggctgtagtaaggctgaactcctctcggacccaggcagactcctgatgttgctttcatgcacagagttcatgctaataattgcacaagagaacttaaaaaaaaaaaaaacaactcaaaataaacgtcataatatgttaattaagtttacagttttctggtgggccattttcatgctaccctagggtgcagtgtggacacacctgtctgccacccaccccacccaccaggctctccaatttctttttaaaaagtgagctttgggagagccacacagttttctctgttcttttgctgccacttctgaactccagggtttaaaaaggatcatttgggtatggaatctcaagatctgggattttttttttcacttcaaggctttagaaaatttgttaagttactgtcttttaagaacagttgaaatgatcaaccagttttcttaagttttagcagtttgttggtatcattaatcaaaacatatagattaaagcccagaaaagacgttatcatttaggatcacggctatccctagtaattacagctttgaaagaggcataaagtttgttcaatcatatgagtattagtcctttcactcaatattaatcatctataagtagcgaaagctgggataacgattataacagctgcgcagggtatttttatgcgaattgaacttaattaaaaaaaagggggggagttttaatgtatgcatttgcccctccctgattacctagttctgctccctccaaagtactcatctgggatggcttggcaacaaaaaaaaaaaaaaaaaaaaaaagcgagagaacgagcgagcgagcaagcgcgcgcgcgcgcgagagaggcagagagagagagagaaaataaagctcattacagcgacctgagaggtctgaaggagatgacagtacgcattcctttagccttctgagattctctggtttcattccacattcagagcttgaaattgctaactgactcgtgattcgacataaatacaattcaatgaaatccaggttctctttcttaaagaccatgctttacacgtcctaagaagcaaacttggacttgggttcctgcaccgaagcctctcccagcagccttgtgaaacctccagctctgccgcccgcttgcttcactcagaacaaagcccccgccgcagactgggggcggcgactgcctggattggctataggacccttgtgtcacgtggctccgcccctcggcctatctcacctcacccggcctgggcgtggagagaagatgccgagtcgcgattggcgggcctaacgcgcggaccggatgacgcaggagaggtggagccgggccgagccttgattggtcgaggtgcgcgtggtcacggatcaaggttcaggctaagagcaccccggtgcagttctacttcggtgcagggcgtggaagatgcggaaggtggttttgatcaccggggcgagcaggtgagacctcctatggaaccccggagtctatgcggggggaagcgcaggtcggtgattcacttcgatggggtccgcagagaccccgttccctggctttccaagaggtgtggtcatgcctgcctcgcttggtgctcggtgcttggtggctggcgctttgaattaaacatgacagtggaaaggaaagctaaaccgccagtgactggtcagcctggcagtgatgctgaacagttgttctctagggaccgtcagtctccgagagtagttaattgtaggtgcccacagttcactttaaacctaaacactcggggtgtttaaatgtcagcatccatgaactttaggacaatgaggaaatttcactcctgcagcatgttttcatatactctttccaggaacctacagaacgaccagtctagcaactaaggcttatcctgatgcagatgccagcaaagttattccaggcttgcccatttgacccttgacctacttatcatttgttgatgaagaatgtgtggaggatggacccaaccaactcccctcctacccccaattggttacattgctattttttgaggaattaatacaggatttgttaaatgccacttaagcctgtttcagtgacccaatcacatctatattaactaaaccagtggaggggtctgtcttgggctttttgttagtgtgcgctctcctttaggtcagctgggttttggccgttctcgagtggaaagtgcctgtagaagtcagacctgaattggtgtgattttgatatactgtggtgtgtgcaacttatactaaagttggtatttaaagtaaggatgaataggccggtatctgcttggtactttgctggcagggccgccagattctgtggattccagactcactttggagctccctttgctggcagtctgcatgagaacttactgttacccagaatggcctcgctaccagcagtgggccccatctgctgcgaccttcatatcactctttgtgacccagtgcatctgaagcctcctagctctgctctttcctgcttctttgtcttcggctctatctgcttgctgattctgctttctgtctacttgtattgagggctttttttttttttaaactcttggctattctgctgtgacttagtagttgacagggatttaacttcaagctgtgctactgtgtattctcctgaaaacaaaacaaaacaaagcaaaaaaaaaaccccaaaaaacaaaaacccaaaccaaaacctcaccggttggttcacttactgcgatttacagttttcctaatagcaacagtaccaagaagtggtgagaacccttgcctttgcgggaccaaggcaccacaagaaaatggggacacggtaaacaactaatacggccccccttaaagtatttgctagagatatattaaatcacaccctaacaggtgctccaaccctcactcactgtgtcattgaaccatattagaggggaacaactggatgttgcttatcaacatggctaatcgggagattccttcttcacataatgtttgggtattttctatctgcttggatttctcattggagctcatattgacactgtcaagtttctgaaccagagagaactgccttcatttaacacca

SEQ ID NO: 1181 - DNA, 3255 bp, Mus musculus
tctaagtggacttctcttggtgtgtcaggaaaagttcggaaaagcggcagagggcagagtttgaatcagggcggaagggcagggagctgggctcttcaagactcaggaccgaggcagatctcatgttttggggtctggatttgtgtcagcgagggaagaacaggcgccaataaccaaagaaggctgaagcgaggtacaggactccatagcagctgcaagtacaataaacagttttagcagagctggaaatgttggcaggcaagacaggccgatcgcagagtcgggctgctggagagagggaaatctacaagcaacctgacatttggtgctcgtgctctagagcattctaaggctcgctgcttgacttctaaagaagctgaaataattgaggaggagcggggaccctctgtttccaaggactctgttctgcagagaatgttctgcaccctctgatactccagatccaactccgtcttctgaaatgatcccgattcccagaatgcccctggtgctgctcctgctcttgctcatcctgggttctgcaaaagctcaggttaatccagccatatgccgctatcctctgggcatgtcaggaggccacattccagatgaggacatcacagcctcaagtcagtggtcagaatccacggctgccaaatatgggaggctggactctgaagaaggagatggagcctggtgtcctgagattccagtgcaacccgatgacctgaaggaatttctgcagattgacttgcgaaccctacactttatcactcttgtggggacccaggggcgccatgcagggggtcatggcattgaatttgcacccatgtacaagatcaactacagtcgggatggcagtcgctggatctcctggcgtaaccggcatgggaagcaggtgcttgatggaaacagtaacccttatgatgtattcctgaaggacttggagccacccatcgtcgccagatttgttcgccttatcccagtcactgaccactccatgaacgtgtgcatgagggttgagctttatggttgtgtctggctagatggcttggtatcctacaatgctccagctggacagcagtttgtactccctggaggctccatcatttatctgaatgattctgtctatgatggagctgttgggtacagcatgactgaagggctaggccagttgactgatggagtatccggcctggatgattttacccagacccatgaataccacgtgtggcctggctatgactacgtgggatggcggaacgaaagtgctaccaacggtttcattgagatcatgtttgaatttgaccgaatcaggaattttactaccatgaaggtccactgcaacaacatgtttgctaaaggtgtgaagatttttaaggaggtccagtgctactttcgctcggaagccagcgagtgggaacccactgctgtctactttcccctggtcctggacgatgtgaaccccagtgcccggtttgtcacggtgcccctccaccaccgaatggccagtgccatcaagtgccaataccattttgccgacacgtggatgatgttcagcgagatcactttccaatcagatgctgcaatgtataacaactctggagcccttcccacctctcctatggcacccaccacctatgatcccatgcttaaagttgatgatagcaacactcggatcctgattggttgcttggtggccatcatcttcatcctgctggctatcatcgtcatcatcctgtggaggcagttctggcagaagatgctagaaaaggcttcacggaggatgctggatgatgaaatgacagtcagcctttccctgcccagcgagtccagcatgttcaataacaaccgctcctcatcaccaagtgaacaggagtccaactctacttatgatcgaatcttcccccttcgccctgactaccaggagccatccagactgatccgaaagcttccagagtttgctccaggagaggaggagtcagggtgcagtggtgttgtgaagccggcccagcccaatggacctgagggcgtgccccactatgcagaagccgacatagtgaatctccagggagtgacaggtggcaacacctactgtgtgcctgctgtaaccatggatctgctatcggggaaagatgtggctgtggaagagttccccaggaaactgttggccttcaaggagaagctgggagaaggccagtttggggaggttcatctctgtgaagtggagggaatggaaaaattcaaaggcaaagattttgcactagatgtcagtgccaaccagcctgtcctggtggccgtgaaaatgctccgagcagatgccaacaagaatgccaggaatgattttcttaaggagatcaagatcatgtctcggctcaaggacccaaacatcatccgtctcttagctgtgtgcatcactgaggacccactctgcatgatcacggaatacatggaaaatggagatcttaatcagtttctttctcgccacgagcctctgagttcctgttctagtgatgccacagtcagttatgccaacctgaagtttatggcaacccagattgcctctggtatgaagtacctttcgtctctcaactttgtccaccgagatctggccacacgaaactgcttagtgggcaagaattacaccatcaagatagctgattttggcatgagcagaaacctgtacagtggtgattactaccggatccagggccgggcggtgctccccattcgctggatgtcctgggaaagcatcttgctgggcaaattcaccacggcaagtgatgtgtgggcctttggggtgactctgtgggagaccttcaccttttgccaggagcagccctattcccagctgtcggatgagcaggttatcgagaacactggagagttcttccgagaccaagggaggcagatctatctccctcaaccagccctttgccccgactctgtgtataagctgatgctcagctgctggagaagagaaaccaagcaccggccatccttccaggaaatacacctcctgcttcttcagcaaggagccgagtgatgatgcatcagcacctggcagtgttcctgtggcccagatccttcccacaagacctactgctcacccacatctaagccactccagctggacattcaatggacccgagagacagagaattagtcactctgccctctctgtcccttgcctcctccactacacctccccgctccctactattgactcatatatacttttttacatgaaataac

SEQ ID NO: 1182 - protein, 886 aa, Mus musculus
LRRSGDPLFPRTLFCRECSAPSDTPDPTPSSEMIPIPRMPLVLLLLLLILGSAKAQVNPAICRYPLGMSGGHIPDEDITASSQWSESTAAKYGRLDSEEGDGAWCPEIPVQPDDLKEFLQIDLRTLHFITLVGTQGRHAGGHGIEFAPMYKINYSRDGSRWISWRNRHGKQVLDGNSNPYDVFLKDLEPPIVARFVRLIPVTDHSMNVCMRVELYGCVWLDGLVSYNAPAGQQFVLPGGSIIYLNDSVYDGAVGYSMTEGLGQLTDGVSGLDDFTQTHEYHVWPGYDYVGWRNESATNGFIEIMFEFDRIRNFTTMKVHCNNMFAKGVKIFKEVQCYFRSEASEWEPTAVYFPLVLDDVNPSARFVTVPLHHRMASAIKCQYHFADTWMMFSEITFQSDAAMYNNSGALPTSPMAPTTYDPMLKVDDSNTRILIGCLVAIIFILLAIIVIILWRQFWQKMLEKASRRMLDDEMTVSLSLPSESSMFNNNRSSSPSEQESNSTYDRIFPLRPDYQEPSRLIRKLPEFAPGEEESGCSGVVKPAQPNGPEGVPHYAEADIVNLQGVTGGNTYCVPAVTMDLLSGKDVAVEEFPRKLLAFKEKLGEGQFGEVHLCEVEGMEKFKGKDFALDVSANQPVLVAVKMLRADANKNARNDFLKEIKIMSRLKDPNIIRLLAVCITEDPLCMITEYMENGDLNQFLSRHEPLSSCSSDATVSYANLKFMATQIASGMKYLSSLNFVHRDLATRNCLVGKNYTIKIADFGMSRNLYSGDYYRIQGRAVLPIRWMSWESILLGKFTTASDVWAFGVTLWETFTFCQEQPYSQLSDEQVIENTGEFFRDQGRQIYLPQPALCPDSVYKLMLSCWRRETKHRPSFQEIHLLLLQQGAE

SEQ ID NO: 1183 - DNA, 168198 bp, Homo sapiens
  misc_feature (1)...(168198): n = A,T,C or G
taggaccagactggcccttagtttgggttcttccatccctgggagtctcagttactggcataaggttggccctccctgatcactgctggaattttaggccacacgagcaccatgtttctcctccagccatcatgtctcaccctccagtggcagaggtagatcagggtgaatgatgtctggaactctccattcctcaatgtaaaaatcatattctctctacccatggaggaataacttttttggaggacaaggatcaaagctcattgctaccctacccttagtctgggctgggaattttttgaaggatggatgccgtgttgcctgtcaagacccaaagtccctatcccctctacatcctgatgtcccactgtttccatcctgccacttacatgcctccacttcatcctttagcaatttatctttctctactgtgagatttagacacctcctgctgcattagctacagttccttcagcttattggagtaagaactgctgaaagagctgggcacccatggtccactgcatttccccacttggttctttttattcttcctcccacaatggccctgagaactcaacgagcttttgtgttcatatttccccagtcgactcctaaaggtgacttccagggcaggcaagggatattctctctagtctccttctgtcttctttgtttaggacgctgacatttccagccttctcaggtaggttttatctcaggtattcattcattcattccacatttaacaaatattttataaatccctactatatgctaagaacagttgtagacacttggagatatgctagtaaacaatataatagtgcttaccttctagggggtataaataaataaactatatagtttttttttctttgagacaggatcttgctctgttgcctaggctggagtgcagtggtgtgatcatagctcattgcagcctcaaacttctgggctaaagcgaccctcctcccttcacctcctgaatagctaggactataagcatgttcccccatgtggccttttttttttttttttttttgatagagacaaagtctgtgttgcccaggctggtctcaaactcctggcctcaaggtatcctcccacctcagccttccaaagtgttgggattattggcgtgagccaccatgcctggcctgcagtgtgttaataagctctaacatgaaacaaaagatgagaaagggggatagaaaatggtaatggagataaaatactagaaagggacaccagatttcactggtaaggtcctttaggaaggaagggaacaatgtaggtggctacatggggaagagtagcccatgtagagggggcagcaagtgccaaggccctggggttggttgtccgatctgaggaggtgtattggcataatctgattagtaggagcaggttggagctgcctgaatagggctatagtttagaaataccctgtagagaggaagtggtgcctggtatactgtaccaggtacggcaactgaaagaagatttagttggcattgcaaagcctggaatctaaggagagaggacacatataggtggcaatctgtgccagaggtcagtaatgggtggagagaatgtatttaatgagtggatagcaagagtggtgggaatttgcctattgtcggctctaaatattctatgctgtgctctgtgatgtcagatctgaggctctgcaaactgcagtcagagattcctttaccaataggcttcctcttaggttctgtcaagaggaggcagaagatgaagactgaaagtcaggaggaggagagaagagagtaattttctatttcttgatatcaatgtcattgctccagaagtggcactttgccccagcagtggcatttcatatcactgtggcagtttattatggcttccagcttctttccgcattcccagaaccagcctcaacttccttcctcaatggtaccagcaccgttcaatgttatgaaccatctcaaaggtcagagccctagcttcacggtgcccacttcttctagtgcctaagttctgatagccccaaccctcaccttttcatcccccagccttgggatggtaattgctttctgctttatgcagttattaaatttccgctcagtcagctctccaacacctgtgtgatcaatcaattccttattaaatccatgctcttgaaatacctaatatggtgtctactttcctgaccggatcttgactctgtctacttgttgaccaagtacttgcctggatttctgagtaatacctccctgtggattccgtgctctgggctctactcctacatcaaagagttactgggaatgccaacatgcgtctctgagtggtttccttgtctgtcataattggaataacaatacccatcttctattctggtagcagtgttagttaatttactagaaaaggcacctgtacagagacctgaaaagggcatgacttcaaatcacagaagcctgtttgatgcagtttaagcagcaaatgggaacacagtatatggacactagtgtcatatggaatccaagagcaggaagagcatctcgaccttgggaagagcttgcaactgagaactcgaaaactgccaggagtctaacttgcctttgcttttttctgcacattgacttcattcttttttccctgctggccaggtctataggggagggagcagtaccaaggtcactgtagactgagaagacctacaaacacctactctcctgggcctcagtaatgccaatgaaacttggaattggggtccagatgagatgtaggtctttaatcccaaatggactagctgctactgaacagatccccctatctcaggcttagattgattctaaggaggtggggagggatgagactgagtctgcagatgaggatccaggggtctcggttgcaggaagtgagagagatgcagactcaggacccatctctccattcacttctgccagttctctcaagtgtattccagatttctcgtgaaaaagaaaaaaattctacctccaatcttcattctgttgaagaaactggggctccccatgggctaagcaaagaatgaaagatttcagggcttgatctgtgttctcagagattactgacatcccatagggtgatcttgtctagattccatccccctcaaaccactcccctgacccctgattggttttggggtgctttgcctatttattttttctatttgttttattcacctcaaatctcttaaatgtttaaaatgaaaacagtttatgcacctgtgttcttctctgggacatggaggaccttaaagaacacagattccatccataagataaacatctgagccttcccagaaacagacaaggattacagagaatcagaatctggtctttatctcgaaaggcaatttgagtgctgctggacattgcaaactggaattgtacatggaaaaataacattggtgctataaattcctttctgctttgaaatatgttgtgtgttagaaacagagaggtaatgtttatggtgtaactcagaatactgggatagagttatgcattaagagtgggacgataggacattatgcaaacagagtccctaaagagagatgttttagtgggtaaaataatttttaagaattatttagatactccctaccaataagtactcacagatattaacctcccagacttccactgtcctccagagatcgatgggaaaagaggaatgaatcactaaaaataaagctcaataactaaaagagctttatcctccaaacttcttggatcagtacagtcagtggggactatgttgattctctcatggatgctggaaagactccagcctggaagcaaggcagctgagagtctttaagtttcataagaagggttattattaagtataagatgattcctgaaaactgggcctgagcatggaaaagtaacactgcttctccaagttcactctgcttggacacaggggtgcaagaggtgctgggagatggttcagctagccgagggttgtttccacagagtacagacaaggatagggttcaaatggcagtggggagattcaggatacataaagcagaacttttgacactgagtgttgataaacactgaggactgtcgagagatcctgttttctggagatgcttaaaagaaggttgctatcttatctgacagggatggtttagggtgccggactgtagcctggagaagggtttgtatccttgatcattatataaaataagtcatttaaaaaactttttgtagcctcactctcttcaaggaagctaaagctgagttacaattctgagatttctgtgtctatttcttcacctctcatcttagaatttctgccgaggcaagtaattgctattctttctctacaatgaaaaagaaaatgaaagaacagcaaagcaggcagggagaccagataacctcgtgctccagaattgagtgtaaattaagagtctagaggctctgaggtttgttattgatgccaaatgggcaggaggagcactgagaatcacaagaactggattcaaactcagattctgttacttaacagcaaaaaacctcaactaagttaccaagtccctgagcttcattttccttcccttgaagtgaggatattaatatctgcactgagtacatattggggctgtctgaggatcagatgaagtcatgtctgtgaaagcactccttgaactgtgaaatattgtatgtggcattgttagaaacagacaaataagaatcttattttggccattaaccttaactttctcttaacttttccgttcatccgtgggagagtcaccagatggactgatttgaattttccttttttgatttctcatctctctctctggtggacgtgctaaggggtaggaacataatcattgatgggcttcaggagggcaaaggatggggaaaaaaaggacatcgatgattttccatatggataacaagacttcaaactctgaaaaactaagaattaactatttcctaactgctctgaaatttttcctgtacactacagaaacacacagcatattattgtcacacagacacacattttgttgtcacacatacacacacgtgttctagctctggcaggtatgatcttgggcaaattaacttctctgtgcattggttttctcatatggccattgggaaaataatagtacccatcccataaaattcttgtgagtgttaaatgaaataataaatgtggaattcttataacagtgtctggtatacagtgtcagaagttttatatgtcaaaagttctgctttatatatcctgaatctcccctcctgctaattgtactcaataaattattatttctggatcttatttgatcttcacaaccctgtgaattttcagttcatattgtcccccattttacaattagaaacgtgaatgacttgttcaaggtgactctgccccctaggggtttgtaattggatcactttccatgaaagtgtccaacaggagaacagcacctagtagtgtgcagggttaggacccagaagataaagtgaacactctcttagagttaaaattatctttgaaagacctttaaatcacttacagtatacatacttctgtggatatgacttcataggataattcttaaggacactaaaattcgagaatcgtggggtaaattcaggaagacactaaaagcaagtctatatgcagctgtctgaacattcagactattttgctttttagaaaactaaggtgtttctattgtctacaagagttcctccacactgatttttaaagactattaagcctttatgccttaatatatgtcaatggatttgtctattatggatagaacaaccaggaacagggagtcttaagaattaggttctaaaattggaggccgggcgcggtggctcatgcttgtaatcctagcactgtgggaggctgaggcgggtggatcacttgaggtcagcggtttgagagcagcctggccagcatggtgaaacaccgtctctactaaaaatacaaaaatttgctgggcgtggtggtgtgcacctgtaatcccagctactcaggaggctgaggcaggagaatctcttgaacctgggaggcagaggttgctgtgagccaagaacgtgccattgcactccagcctgggcgacaagagcgaaactgtctcaaaaataaataaataaataaataaaaataaaagaaaaaagaaaaagaattaggttctaaaattggtgcttaagttaaatgtgtgcagaatataactccaaagtacacaatattctctgcttttgtgttagtaaggcataatttctttaaaatccagggattgccatgcttgtctaattattggtgtaacagacaattttggggtgtcttctaatgtatgacatcccttttctgagaattgattcatgtatgcgtatgagctcttggagccatattcatattatatgatccattgccctctacagtttagagatagaggatgcacataagaaacacatttgaccagtaaaattctccatcccagcattctagaactggactcccataatatctgtcattctctcatgatcgtttgaagcaaggagagataaatttgagaactaaggcactgttacaggcgcctgctataaccagctataatattatgcgaaaataagcagaaaaggctggtttactgaaagagaatgggctaaagcaaaatgagcagcggtaagcagaggagagagacaagaaatgaatgagagagagaagaaataagagaatgagaggagaagaaaagaggagaggaaagaagagaagagaggaggaaaggagaagagaagacaggacaggacaggagagaagaaaaacctgttgactaagttactggtggtggctaatttgtggcttaaattccttgtgaagttaaatgtaccacatgggtttggtttgtgtgaatatccatgtatccttttaaggtatgtgtgtgtttctcaaactaagttaagttaattcattttactttcatccttcattttatgtcctgaggcatcacaaaagcatccagctcatagctatttagagacagaaatattatagttatttcaatgctcaacttttgtatttacttgaaccttggtttgtagactagaaaaggtcttgaaaagtcatcttgcacatcttacttctaattaacactgcatcttgaccattccggatagatctgtcctatttttgtaaaatcccagtaatggaattctatattgtttttcagtcatttgttttcagtgtaaaacagtcctcataacaaaaatacattacttcctatggaacagaaataattctgaatgcagtgactcacatttcccaagccagaccaaccagggggtaaaatctgttcacagaagagtaataaaatggtatttctccacatctgttcctgcaatattaggaattccagtcttactcaaaactctaccaaatagctctgagagttcccaggacatttcttctgtgtgttccatgggttagtcccgtcagctttgaagttagcatttgccattttcttactttccagctctggcttcctacagcagtggctggtgtcaaggctgaacactggttgtcactcaatcagagttgtctctgaaaactgaggcttcaatctaatgaatcctcctcatgctttaaatatccctgaagtattttagtaaaatatcactttcagcttttccttgctcttttctttgtagaaccttcttcctagagttcaagattagaccccagctttggctgagaatagcctgagtgatggagatggtgttttgagtgattgatagacatgctattttcctttgagctactccttactgttgacgtagctcagtttttcttgggacttttatcccttggtcctttctgtgttcagtgagttcttccccagaagtgtcctggtctatatacaaatagactcttgactgcctagtccgcctcagacaaacccaggtgtgtctgggttttgcagtctacatcactggctcagtcctggctcaattaagactacaacttgagttctaattatacatacacagagaaaaaacaatctcacctatggagtagaaccaccttaaaatgaaaaaggaaaacacatacctatatgtacaggccctgtcctttatcaggctcagtctggttttatgaagttgttactgttttccacatttgacctatagtatcaccaaatctgtgaaatcacagattgtatttttggtacattctttatagtaatgccaaagaggtgaactactacaggcatggacatttgaggaggatttctagttgtctctggcaagcacccagtaaagtgcctgataagagcccaacacatatttattgagttgagctgcatgtctggcctgagtcaccctcaggcctgacttcagatgctgtaagttatttgaagagtcttcttaataagttgatctctgcagtgtcttttctcttcataaactaaccctagttctagttttttctctaaggtcttgcttgctgcctttaatcatttccatggctgccctctgaaccattcccatgttctccgtgtccttttctgtaacagctgtgaggcacagatgttaacggctgctttctgaccctcagactggtgctgagcttatgagacttttagggacttaacactgactcaacactagctctcagtttcatggccaccctcattgtgtgtgtgtgtgtgtgtgtgtgtgtgtgtgtgtgtgtgtgcgcttttccattccccttatgaaacatctcctgcccctaacttactatgggaacgttcctccatgatctctttccatcctccctttcctgtttgctcacttcttttcttgctcatcttggagactgtgcaatcccagattaactacaaacagagaagagctggtgatagctccagagctcagagaaaggaggtctctttacaagaagtctggctctcaaaggtaagctcggtcttcttgacctgccttttgccatctacctctctctttggatctcctgcccctgggtccctgcttgccctgcattctccatactcacggagaatcaggacctccagaacagcccagcgtgggcttggtcaggaatgatccaggctctgaagggttaaggctggagcctggatggatggagagggttattagttatcgtttggagagtggagtgaaggctcctcccctgttgcctacccgcccctttcacatgatctctgactatagctgtggaagcggggagaagataaaggagggaaaaaaaagttcacaaaataatttagaaagtccttataaatgcttgtgttttcatttagcagcatgaatccaggacagcaacagaccctcagaggcagcagccaactgggaattgagtggaaaaaaataggaatcctggattctggcagtttccagttgttttcttggtggggggagccgtggtgggaagggattaaatcaaatctttcgggggagagctcagctctaggctttcatggtcaaaatactaaaggtcagctccgcgtgtgtgccccaactgtcctggaagcttcaattggaaaactccaaactttaagttttgcttatagcttcagctcaagtaagaaaaatgaggtgtggggtaggcggcgggggggtggggatcacaggaaggggatcaagtcttagatggaggggaaggaagtggagatggatatgggtgggaataaggcagaagggagcggtgtctttaagtctgtcctatggttatacatattttttcttctatgaatgggttttgctgtaaattatagctttgcccatagtcccttgggtcaaaagaaatagtctccaaacagaaaacagctctgattggtgactttccttcttccctccccaacccccttcctaattgaaaccaaatgtgcaatatattggatgctgggatccctggcgctttcccaggaatcctcagaatgtgaggtttctctcaaaggcatcttgcatcagcctgtggatgtatgcctaccaccgggctccttcaccagcaaagtggaaaaagaagcgtttcacaacaaattcttctttttgggttggggaaacgcagtggattatagctctgttttcttctttccaaaactgtgcacccctggatgaaagtaagttatgtgggtcttttttctttattattttttcttttttgaaaatgaaagctccgcatatacttcttttggtgtttcaggaaaagttttaaaaaggaaacagaagggcgttttaagtcagacaaggaagggaacgtaatgaggcaccacagactcgagaaatcagatcccatgtttttgggggtctggatttatgctatgaagggaagaataaagagcagtaataaccaaagaagcctgaagcaaaataaatgaatctatagcagctgcaagatacaataaacagtgttagcagagttgaaattgttggcaggcaagacaggccgattgcagagttagtttcaggatgaagaaggcagagcaggagagctaagtttttagacatttagtagtggtgttagaaggtcctgagttttggagatagtgtagaccaagcactttttgtttttcaggggagttgctgatttacttgtgagaagggtaactttggatgaggggtggcttccccctgagatttggggtggctagggggaggctgggtgcatggaagatttttcagttgtgacagtgaaatacagcttcccagactcatctcctcgctggctctgggtgcctttccctttgttatggaatgactggggctgttttcatttgggacctctgagtcctggcctaggttcaagagtcccatccaaagggaaagagaactgttcccagtggctgaaactctcagaccagccatttgaggcaagagttcgtactgttcaagccagtagggggttcagcaccattttgccgatcattggcttcctacaacacagagttaagagtcctgaaaagggccttaggcctctcatctaaccccttcgctccacagatgtaaaaaatgataggaaggggaccgacctgttcaagtcccacagcacatctgtagtggagctgaaaatgaaattgagattctctctactgctagtccagtgttctttccactccatacctctgctttcatttcctttttaaggcttattctggctgagacaatagaggcagtatgatgagcaagtcaccacaaggacgttaattatcagtaatagagaggacgccaatggcggctcatcagctaatgatgtctatggttatatttgtgtgtgtgtgtaaaataaaaagaagctaaattctgagtattttctatgcagcaggctcaaaataatacataattcatgctcagagctcttcatacataatttgattgactctcacagctatgtaaggcattatttctatcgtacatgtaaggacattaatgcttagagaagcgaaatgagttgctcaaggaaaggtagctaatacatttgaaactcatgtatatctgactctaaaacctatgcttggaatcactattcaatgatactcccctcatctcccttgcatttggttacttttggggtcaaattccatatttcactggctgatcaggaggtgaaggtgtcaggctatgggagcagtatggattctctctcagaggccacttctgcacttggctgaacatttgtctggatatcagatgtggggttgatttctgggtctttggtatatacttacctttgttatgcaaagagcctgggacttagagtcagaagattcaggataagttctggctctaccttttactacttagcaaagttgctttgcctttctgcaccttgacttctgtatttattatatgggaacaattgcagtacctttcagtgtgattgctgcaagaggtattggacatgcatgcatgctgaaggctatcaagggcttacccatatcagctctttcgattaggatcggtaaacacagaacgtcatatgaggcagcccctgtggtgctgggtctggcagttggtgctgatgctggcaggagggcagatggatttggatgtgtgtgaaactctgaaatgggtggcctcagtcttagtgcccatctcctttgaatggaagcaggccttcctccctcccgggggaatattcctgagggctctgtcttaaattctgtctcttaaattctcctccactggcctggtttgatatgattccttgcccaaagcagtgcaggctgaaggacactgtgcttggtgaagcatcccctgtctctgaaaaggaagtgtttagtcaggaccagtcccctgattgctcctcagacaagactgacatttgaggagcttcgtatctagctgagggcagatccttgacccaggaccttcttgtcactggcaggcacatctcccttcatcctttccctggcattccctattctgtgcctgcagtcagaagggaggctgctgctcctggggtgggggtggagagccagcctgcagtggggaggcctcagcctctgtttctgggtaagatccatttgctttagaaaccttaaatgtaagggaagtgggtaaggtgtttccggaatgcctttcacttagattcctcaacagagtctccatgtccaagcacaggaccttatcacctgcttattctcccctagccactctgtgaactcgcacttttctttccttcttgtataattgctccccagtcttgaagtcatctgaattctctatcacacacagtgaatttacttcaaacctttccatgtatttgcatttttaatagacacatgaaaaaattggagcggccacccccccatacattcatgtcacaccattttcaattcgcatgagctctcagatatccttcccaagctcccttacaagatctgctttcaggcacttcacatcaccctcacctcaaacacacaatccaaacacatgtctcgcaggcatccaaaaagcaaacacacgtctaaaagtggacctccacagacatgctaacattcttgtgccagctcacataaatggtgacctgtccgcaacacagacacactggactctttatacctcttgccctgtttgaagctgtgcaacatatgaattgatcgactctgtcccaacaatgactagtcagtccagaaatgtgtccagcatccccaggcatcccagggcttctctgaatgcagcaaccatccataatgaggactgttcaccaggaaattagaaaccccaggtagaccttaaaagattttcagaccaatcaaatcagaatatctgaggttggagattgggaatcagtactttgaactgctccccaggtgattctgatgtgaaacagaattaagtacctctgctgataaatctccaactgtgttgtctttggcaattcaattttattccatttgatttagttctattcatcaaagatttagtaacactgtgctaataacatagtttagtaaagaagctgagatgtccagatacctgtcaaggatatttattggaacatcaatcacctcgtgtctaaagtgatgatctctgtaaatttttctctcttttaattatatttgtatatgtttaaatgtgctattattaagcctgcattattcatgtacgatttggctaaaaatggttctcttattttctaattgttttgcatagatatatttgatgtttcctaattttataaaccccagcatttggcaaattgtgtacttattagctggaatcttactttggctttgaaatgctgaagaaggtcagttttgagccagcccaagagttgctaaggcctggaagggcaatgcaaaggtagaggaattctaaacatgggtttggactcactacacagctcctgagtttagctgggcttctcctggaaattggatattgtctgtaatggatccactcattaagtcgtctgtggcttgtgatttgtgcctaaaagaaccccacaaaaatctgtgaggggccctttggatctatagctccgaggttagtgctggctggtgctctgtagtgtgagtgagagggagagggcatgtgataaatagaacttcagatgcgtgatgtagtgaaaagaacatgtagtgaggctctagtcccaccaccatcattttctagggtttcgacctcagaggagttttttaacttcattggtcctcaatttccccttgagtttttatccccttcatttgagtttagataagataatgtataggaaactggaaagcactgtacctgtgaagatggtaggtaatgcaagataatccttagggccttaatagcttaggtagccaaaataattgagatgggagatggattaaaaatgagggcaaataatctagcatttttgcattttttccttttaaaatttgaatgctcttatgaatccaaaaaaacatgaaacaatacaaatctcagtgaactctcacgtctaagatagttttccactgattttatttttctcttgaatagtggtgatttaaaaaaaaatcgcaggtatattttttatctattaaaaatatcatagcatcctggtaaactctgtcataattttgttttgctgtatttatttatttactcctcagtaagtagttattggatgcctagtctctgctggacactgttctatgttttatgatgaacaaaccccatgaagttacaagcatttataagcattcattgctttaggttctagggagtataatatgaatttgactgtgtgaaacttgatttagaaaattggtatccacattgggttaataaaatttagtttttaaagtttactgaactgtaatttaaaaataatacagaaatagttattaaatggtgattttcagtggagcaggtgttatgccataaataggaccccaaattttatattttttataatttttaaaaattatagagcaactttagctttacagaaaaactgagaacaaaatgcagagttctcatgaattccttctaccctttgcacaatttctctattattacaaccttgtattagtattatgttttatttgctatcagttactcaatgtgtatttattaaacataacaaaataataaataaatttattatttatgccctatttgttattatgaaaagaatacatcatattgctgcctctcaagctgtttataatgttatgtagctacagtttgaggtttctcatttattagaaaaattttttttctgtgcacttagtgcatgccttattcagtgctagggcttaacacattatctggacatagtagacatttaataaaatatctgctgagtatacagacaaatgaaatgaaggatccagaagtaaaagacgcaattcttgtccttaggaacttaggaaacaacagacacacatagcagtgactggagaaaatttcagaaatacataaaatatgattaaatctctgataaaggagacattggtataggcaaatgaggcataaagccattaccaagagccccatcctctttttcctcctttttgggactgtacttttttttaattttttttatttgtttgagacggagtctcactctgtcacccaggctggagtgcaatggtgcgatcttggctcactgcaccctctgcctcctgggttcaagtgattctcctgcctcagcctcctgagtagctgggattacagacacccgccaccaagcccagcaaatttttgtatttttagtagagttggggtttcaccaggttggccaggctggtctcaaactcctgacctcaggtgatccacctgcctcggcctcccaaagtgttgggattacaggcatgagccactgcgcccggcctgggactgtacttcttatcatcaccattgtctttgttgccatggtcttcattattatcatcataattatggctatcgttctatgtctaaatccaagcattaaagaacaaactcccatatccccatggtaaggttggagaagtgcgtgcaagtgtgtctatgtgtgtttttggcaattttaaagtacagtcacaccaatatatgccacttccatttcttgctggaagtaaaatgagtgactacttgggctttgtaaaagaaaatcgcactttggaagtccttgtgggagccataccaaaatgccttgcagtactgtaacttctcagaggcatgtaaaagttagaggattggtgaagttttcaaaagctactggcacttgtccttcaggatgaaccctcttgagatgcaggggagcaaattgacctcaataagagagtagtgggagctaaattcactcaagaatagcaatctgttcctcagacagatgcagttgtaattttagaatgtgtacataacagacagtttaaaatggacataataacgctaaaatagtatcaatggaaattaaaaataagtcctaatcccaaccaaaattctagcaagttgttttgtggatatcaacgaactgattctttttttttttcttttttctttttctatctttgagacggagtcttgctctgttgcccagactggagtgcagtggcgcaatctcggctcagtgcaacctccacctcccaggtccaagtgattctcctgtctcagcctcctgagtagctgggattacagacatgcaccaccatgactggcctcaaccagctgattctaaagtttatatagacagttaaaagaccagattagctactgcaatattgaatgagaacaaagtcaaaggactgacagtacctgacttcaaggcttactgtaaagctctggtaatcaatacattgtggtactggtgaaaaaataaacaaatagatcaagaaaacagaatagagagcccagatagacccatataatgtagccaactgttctttgacaaaggagcaaaggcaatctgatggagaaaaggtagtattttcaacaaatggtgctggaacaattggacatccacatgcaaaaataatgaatcttaggtataaaccttacatccttcacaaaagcaactcaaagtggatcatagaccaaaatgtaaatgcaaaacaatgaaactcatagaaaataacataggaaaaaatctcagtaatcttggatattgtgatgactttttagttacagcaccaaaggcactatctgtgaaagaaatccctgattagctggacttcattaaaattgtaaacttccactctgtgaaagacaatgtcaagagaatgagaatacaaaccacaggttgagaaaaatacagatggtgctgacttaaaacggttcaacttacgatttttcaactttacgacagtgcaaaagtgatactcattcagtagaaatagtacttcgaattctgaatttcattggacaaaactatggaaacagtaaaaactattcgtagttgccaggaattaggggtgagggagggataaattgaacacagaggatttttagggtagtgaaactgttctgtggttactacaatggtggatgtatgtcattatacctttgtcaaaacccatagaatgtacaacactgagagtgaaccctaagacaaacaatgtactttgggtgaaatgatttttttttttttttgagatgaagtcttgctctgtcgcccaggctggagtgcagtggtgtgatctcggctcactgcaacctctgcctcctgggttcaagcgattttcctgcctcagcctcctgagtagctgggattacaggcgtgtgctatcacgcccaactaatttttgtatttttagtacagacagggtttcaccatgttggccaggctggtttcgaactcctgacctcatgatctgcccccctcagcctcccaacgtgctgggattgcaagtgtgagccaccgcgcccagctgaaaatgatgtgttgatatcacagaccattaggtttattgataggcttattgattgtaataaatgtgccaatgtcgtgagggatgtcaatagtgagggaggttttgtagcagaggacaagggtgtatatgggaacaatctgtactttctgcttaattttgctgtgaacctacaactgctttaaaaagaattaaagtttaatttaaaaaatctgcccaatctccaaattctaatactttgattccatcttggctacttctttcttatttgaaggcagtcattgtaatatagttataatcatgagcatctgtattttaaaatgcttaattttgtttttcagataagtaccctaaacttaaatgatattattttatttattaaagctacctgaggcagaaatgtttcaaaatcttgaaaaagactaattcaataggttaatagcagataagtaggtatttttgtgtcatactcttcaaattataataactatcacttaaagaatagtcatttttgttcgtttgtgatccttccacctcagcccctcgactagctgggactatatgtgcgtactaccacacctggctaactgttgttttttgtagagatgaggtttcactatgttcttcaggcaggtctcaaactcctgggctcaagcaatcctcccaccttggcttctcaaaatgctagtattacaaacatgagccactggacccaccctcattgagctgttttaactacaacttggtatggtagaaagagtgatgggccaagggttaatagggtgagattctaattttaactttgccacctacaagcagtgggactttgtgcaacaatgttttaaatctttctgcatttaaatttttctcatctgtaaagggcaatatacaatttctgtattctccagttcagttatgctaatcgctgtcctgtcagcacccacatccccatattcactttcacagataagacttgagtcgctatgatcttcaccctagttgtcaccctgtccccatactctctgaatatgctcctctctcctctcattttagccaaataccactcttctttgaaggccagcttaagtttcagatcctccatccatcccagatcttcttggaatccctagttcttttggtcagtatcacttagtttagcaaagaccatgtcttaggtgattgctctaactcaccttatagcattaacccataagtgagtacttactgaactctcactgtatattagattaagggcttattttatatgcctggcacagttcttatttgttgttggaaaaatttttagagggcagtaattgaaatgtcatatactatagtctttgaggatggaaaagagctcagtaagtttctattaattggttatgccgttaagatcagcatctaaagagagctaggtcatggaaaaaatggcctaagtactggacttactatcagaagtactggacttaaattttaattcttatgatttgtgaacattgtagaaatatactaatgtctttgtgagtacagataaggaggaacagataagcttatgtgaaaactcggtttgtattgggtctatattatatacagggctattttattttatttatatttatttatttatttttgagacagagtctctccctgtcgcccaggctagagtgcagtggcgggatctcggatcactgcaacctctgcctcctgggttcaagccattctccatcctcctgcctcagcctccgaagtagctgggattacaggcacccacaccacgcccagctaatttttgtatttttagtagagacagggtttcaccatgttggccaggctggtcttgaactcctgacctcaggtgatccacccgccatggcttcccaaagtgttgggattacaggcgtaagccaccatgcctggcctattttatttatttatctatctatctattttttgaggtggaatttcgctcttgtttcccaggctggagtgcaatggcgccatcctggctcaccacaacctccacctcccaggttcaagcgattgtcctgcctcagcctcccgagtagctgggattacaggcatgcgtcaccatgcccggctaattttctgtgttttttttttttttttctttcagtagagatggggtttcttcatgttgattaggctggtcttgaattctcgacctcaggtgatctacccgcctcagcctcccaaaatgctgggattacaggcgtgagccaccgtgcctggcctgttttattttattttaacaacaaatagaaggtggttattccaggagggtttcagaatactaccccagatttggtttctcctggtttgactacaggcagtgctggtgtctttctcttgatcatactcctttcctcatgggtgtgttcagtcctctgatgatagaagtgcttacctttatttaacctttccctctctcactgagtgttctctctttcctgaaatacttttcatttgttaaagcttttaagaaattcttatttgaacattcagtgttatgtaaaaaacaaattaactgctgcttaatatcatgtttggaggtgaaaaattttctaagccttttgcttagccatttattaccaaaggggtatcaagcttggatgtcaagctaggatgtaaattctagacctatacaattccttcaagggcggctgaaaagttgctttctaatccttttgctatattttggtggcaagctttgttttcacagtttaaagaggattgatggttttcctattgtctttccttcacaactttctgaagttcacttgcctgtttcattttcatgacttaaggtaccagcttcttctgcccctctcctagatccaccagcgccccccatgctccagaaaaattgagctacactgtgcctttccctgagctgtagaaagttccacctctaggtttccaggtgcttctgatcatcatttttcaatggattgagttgccaacatctacaaaatatattctaacaaagatgctcagaatgtctggtgttgacctatctatacaggtaaacttcaatgactctgcatttccctttcactgctgacctcatgccttttgcagaagtaatataggaaagaagagcattgaaatagggcagaagatctaattttctttttctttcttgagatggagtctcgctctgtcacccaggctggagtgcagaggctcggtcttggctcactgtaactccgcctccccggctcaggtgattctcctgcctcagccttccgagtagctgggattacaggcacccaccaccatgcccagctaatttttgtatttttagtagagacgaagctttgccctgttggccagtctggtctcgaactcctgacctcaggtgatccacctgcctcggcctcccaaagtgctgggattacaggtgtgagccactgcacccggccagaagatctaattttctaacttacaatgtactcgaatattgaaaggaatttcatatttttagaactaagccctcattggggttgggtacggttagggcaaggagaagcctgggaaggagttcttgggtagttaaattggaaaaagagagtctggcacattcagaatggctccatatttgttacccgcagactgtacataagaaatgagacctggctattaagagatatgatgcctgtgaaaaccctggatacacttgcaacttgctttttcccaagtgtttaggactctagtagggacacctccagttccttttggaaataagctaatatttggtttccaaaaatgtattgaagtagtcttaatgagacaaatagaaaatagaaatttgattgaatgttcttacgttcttaaaaatgctactttttagcatttttaaaaataatgaagtacatgttggggtgggagtggagaagagactgtaatatttctgtatctgaagcctccataaggtcttaatccagccctccataggaacataagccataattgtcatctacaacttgttcctaaatttactcagctacagtttctcagagctattgagggaagtactacgatgctatttaaaaatactttcaaatccatccttatgatgatgaagttattatagttacaaatgcatgattcagcaataggcattaggaaaacatatccaccagacagcctgatgatcatggtgtatgacactttcttctgaatacatgagggttagatgaaagtggtgacaaacgattgagatatctagatccacattatttacctttttttttttttgagacagagtctcgctctgttgcccaggctggattgcaatgacacacttggcttattgcaacctctgcctcccgggttcaagtgattctcctgcctcagcctcctgaatagctgggattacaggcatgcactaccacacctggctaattttgtatttttagcagacagggggtttcactctgttggccaggctggtctcgaactcctgacctcaggttatctgcccacctcagcctcccaaagtgctgggattacaggcatgagtcaccacgcccagccaaccacacttcttaaggctagataaatacatagctttaagtgtagagtaaatggtgtctcacttgcaaagaagaggatctcttggtcctctcctttccccaaccccaaataatggctttgctattggcaatgtaaggtgggtcggaaagtttgtgaagcaatggccaagggccttatggaacaggcatactgcaggggtggcgtggtcataagttgctgatgaagcagattctctgtcactcatgcctggtgaacaggcggggactcccttcttcaagagagacaggtgatgatagaagagtagacagccctgaacaaacctttcctcaggattgtcccttttggtattactcagacctgaataatacatggacatgttttatagggaattttttttcagctttttgggtgatctattattaggatcttattaaaatatgtataattttaaaactaggtatacacttcttatgcttatagttcttatgcaactatagagccaaaacaaattaataaatgaaatcaactatatctgagcagacctcaggatttgagagagagagagaaaaagaaatcaaatataactatgaaacccaataaaatttaaattattttaatgtgatagataatgtggttttgttgaaactaatcactagtgtggaacttaaagatagacacagtagaaccatgtatcctcagggtctggtctatgtttaaatctgttatttaaatgtattaatttcatgcaaagcatgcctgttagtgtaagtatgttgaacaaattgttattaatagctttgagggttcataagttcaggaaaataagatcttaacccaaactctgtagtaagcaatcatcgaatgtcagtttctatgaggtgtcatttgataattttttaaattgtttactcacttgaagatagggttagcattgtgttgatattaaaattggtactaaatggatatctaatccatttactaacagaatcagggacagaaccattcttctttgtgtgtttatgcctcaagtttctgcttataagctggtatgtgttagtatgtaaaaagccaaagtccccatagcacatctgctcacagcgtgaagatggcatcgaatcctatggctgagtagattgaactgcctcatgccatgcaacgactcagttttcccaacatttcctctatgtccagattgatccttgacttcatctggctttcactgggcatttgtgcaattgtaaacaccaatgaaaagccaggcagtgaaattgcatgatggttactgcttgtattaaaatgttaaattataatcgaagacagaaaattttttaaatcctagaactcttgtggactgcaagatatttatcctttgagacaaactgctttaaaattaaatttgggctccacggttctcaggaaaacttttctcatttgtggtctttcctttaagttccattaataattaaaaatgacaattgtgaggacttctgagtaatgagtgtttattatgctctaaaatttaagataagcactttacatatgtaatctcatgaaaaccttgtaattggtgtgaggtgagtgctttggctattttacatgtgaggacacatgacaccaagaaaaggtcaatcacatgacaagtaagtggcagcagcggaatttgaacctatatctttctcattgcaacgcccaagccttacacactaaagcctcttcttatgtctccatttcacattgtgaaaacctgtttaactgcaactaggaaccagtgctctacaattatcctcttacattcctgtcttttccattgggccagtgggtctcaatctttaatatgcatcagaatcacctggagtgctttttgaaaaatgcaggtcccagatgccactccgaatttactgaataagaaattgtctgtgcaaatgtccagggggcctgaatcttttaaaacaacctccctcaggtgattctgttgcaggtgtctgtctgatcacattttgtgtaaaactgcattagactgtggatgcctcaagaaccatgacttttgaaaaaatccatccttgtacctcaaggactcactcactaaatgcttgtcaaataagtaaaagaatgaatgaaggggcaattgtcaagaaagatgtgttcttgggaagaatacgcttttggccagacccttggaaaatttagagatgcatgtttaaatatcacttaatatactcggtctagactctccttcctggaggccaagcatggcaaagagccgatgagagggtggtagaaagtacaaatctatctataaaaaaaagaatgaaaatgctcctgaccatccaggatgagatagaataaatcttcccctgcgtttctaaaactaaagtcaattgaactagaaatatttaaatgcacttgaggcccagaaagagattcatttccttaatgttttgtggacttgacgttttctacttaaatcatagctctaaggtcaatatggatttgttaccggcaaggggtcccaatctacaccccaagagagggttcttagacctcacgtgagaaagagttctgggcaagtctataaagtgaaagcaagtttattagagaaggaaagaaacaaaagaatggctactccataggcagagcagtggcatgagctgctcaattgggtatacttgtagttatttcttgattatatgctaaataaggagtggataattcgtgagttttctggaaaaggggcagggatttcctttggaactgaggatccctaccctttttagactatatgaggtaacttccagatgttgccatggcatttgtaaactgttatagcgctggtgggaatgtcttttagcatgttaatgcattataattagcgtctaatgagcagtgaggatgaccacaggtcactttcatcaccatcttggttttggtgggatttggtaggtttctttactgcatcctgctttatcagcagggtctttgtgacctgtatgtgtcttgtgccaacgtcctgtctcatcctgggactaagaatgccttaacctcctgggaatgccacccagcaggtctcagtctcattttacccagtccctattcaagatggagttgctctggttcaaatgcctctgacagattcattcctgtatttagcaagaggttttttcctttttttttttttgagtacttactaagagtcttgtatttaataagacatagtcctttccctttctgagtttattttcagttagaaaattccgggagcagtaaaagagcaatgcaagtaaatggggggctagttgctcagaatctgcaaatgtaagagtgcatggaagggtttgtatagccaggggactggtgctggatgctgcaaattgaataagaattggaataaattggatagccaggtagcaaagagcagtggaacagacacttggcagtcagattgcttatggctggctggttcagttaacagtgaggacaggagcctagggtggtgggatatttgccttggggagcatggggaaataacattgcatagatgggttttctgacattaaatagagctttggatgttgtggaattttgaacatttcctttatctgaaagccggtgaagtgttgtcttaagatgtgacagcagtatgtaagcaaattgcaggggataagaaatcaagtcagggagacccattagagggctgcattctcagaacaaggagcactgaggaaaaaattaaaaaacaaacaaacaaaaacaaaaaaagaaggttgctttcggtagtccagatgtgaagggacagggtttagaccagggtggtggagtgcagaaagaaaagccagagggatgtggaaggacaagatggcatgaccacgaatggtggcaaaggcagcgtggaacaagcacatcagctgatgtggaatgtatgagaacaaaaacactcattttcccaccagaacccttagtaggagaaagtgccttaagcttacagtgaggattccaaattgaaattgctcagtagctgtttcaccctttgttactggcagagcagatggctctggaagagactaggactacttgttgcttctctttcccatctctcaccactccccaaccttatcccatagtgaggaccactcactagtgacatttctgcttgagacctacaaagcaagtcttgctaatgagacttaggcactttttcccaaagtgcaattcttggaaatctgtgggttttaagtagattacagggccacagttccgtggtcaaattagttcaaaaaatattgttagagaattaagcaagtttctttactgcaggatgtcccacagtctttaatatggtaatcaacattttgactatccaagagagggcgagcttagagcactccacaaactttttggatcatggagctctttttaaaagaagcaccttgagagaagaggatggcacagcatatatttaaagaaattagggactagaaagtttgtctcttgcactagaggttggtagtgtcatgcaaagaaacaagagttgggatttgggtccaggctttgccactaactggtgatcttgggtaagtcattgaatgtctctgagcctcagtttccccaggggttatgttcattctaaatgaactcttcagctcctttcaaaagtctgtcttcatattcaaaaaggaaaataatctgcaatttctctactctgcaataactctggtggtggaggcagtggtaggaaaagagagagtagagcggacagtgacaagaagatgaataagatacggtctgaacccctgcactgattagactgttgggcacaattacagtgctgggctgatgtaacaaagataaatgaagtttgtagtgtgttctcaagcttctctgactccaaccacatcatgtgatatacagcaactagttcagttgctaagcaacactaattcccaatggtcacttaatccatctagtctcagttctgctactaagaagctgtgaggccttggataaatcagttaaccctttgggtttgggttttcttcatccgtaaaataaggaagttgggttaggtctggaaccatttttaagttgacctgagtcttacctggaagaaggtaaaggaaacacagctattctcctctcacccaccctatgcagatgagccccaacattctgtcttcgcttttcttctcttccttcctcctggatcacttaatctgtctcagactttaattattgcatttatgtagttgaagttcaaatgtggatctctaagaccaacccttctcttgaatgccaaaatcaagatttgtctacctgttttcattctaaggaaaccaaattacttatgtttcaaaccaaactcacaatctccccttacaaaccaattcctcctccacgttaaaaaaaaataataataataacagaccaggtgtggtggctcacgcctgtaatcccaacattttgggaggccaaggaaggcagatcacttgaggtcaggagttcgagaacagcctggccaacatggtgaaagcccatctctactaaaagtacaaaaattagcagggtggggtggtgcgcacctgtaatctcagctactcaggaggctgaggcaggagaatcgcttgaacctgggaggcagaggttgcagtgaactaagactgcaccactgccctccagcctgggcaacagagtgagactccatctcaaaaataaatacataaataaataaataactatgtgctcctggtcacatgcagcccagactcccaggcttttcgactccctccttcttccctcctgtgctagtcattggtcaattctcaatcctctccacattattattattattttttgagacagagtcttgctctgttaccctggctgtagtgcagtggctcgatctcagctcactgcagcctaagccttccaggttcaagtaattctcatgtctcagcctcccaagtagctgagattacagtggatgtgtgccaccatgcccagctaatttttgtatttttagtagagacatgttttcatcatgttggccaaggtggtcttgaactcctggcctcaagtgatccacctgccttggcctcccaaagtgctgggattacaggcgtgaaccaccgcacccagcccctctccacattattatatgtccacattatttatttccctttcctgatgtcattattgtacgtcaggctttcattggtcatcctgccccaggtctctcctccaaagcaacccacatgccaggttcagcctcacagagcttctctgagcctgccatcccactctccaaagcctttcccggctctcttgtgctcactccttgctggcatttggagccctgcgttttcccacctcaatcatcttccagcttccagctttgtcttcgattacctgtgtgttcctgtcctcccgccaactatttattaatcttcttatcccataacttgcccattcaaattgttcccttttcttagacttttgtctgcattctttctatctgacaaaatcctagtgatatttcaagagtcagctcaaataatggctcctcactccaacaaatctttagggaacactcaactggcttgatttctccttcttttagcaccttgttctttcctttcttactaccttaccaacccagacatatatatctactatatcttgtaatatccattatatcttttttgaggccaaggaacatgtttccttcatctttctatcaactatagtacatattacatactaggaactcagaaacgtggttgaacaaattactattaaattattaagctattaaaacaataatctattgaaataatgtaataatcttaatctcctaacaaaatactaattaaatttaagtaaaataaataatctacaataatccaaaaatgagtcgaatcttggtttactctttggtgttttgtcattctactttcgtgtcaagtttagaaataattttctgaagaattttgattttgattttagttataactttgcgttagtaagaccatcagcctacggttaaggatatttgtctcacctgtgaaatctcactatctccatgaaaccgactggcttcgctacatcatgggaagggtgttatctttcctagttggagcatcatatgatgatgtggttgaaaacatgcactttggcataagacagacttggtttggaattctgactctgcccttgttggggctgcttggggaatttagttagcatctctaaatattagtttcctcatttgtaaatggaggatgtaattgcaggtgctggttctactcttggaaggattcaaaaattgtcatgcttacctgaggggctcctccaaacctgggcggggttttctgtatgccttatggacctacaaatgcaaaccacactgactatgtaattttgggggcagattggaaagctgaaacagaagtgcagggactgttggtgcccatcttcctggcctggtggggaggaatgtaggaaagcagactcgtgcttctcatcttgaatcagacagacgacagacactccaggaaattccttttgtttggaaaagaaaaatgctctgccatcttctcttaccccagttttctacattcccagacttcctaaaagagtagaccactggggttccctgaaaagccagctaagtccagcacatacgatcagccccacagctcattttggttcacagacaataaggagagaggacttaacaattactgagtgctgagtacccactatgtggtaggaacattttgtacataattacaattatgcatcctcataactttatcacataagtatcatctctattttacaagtagacactaagcaacctcccaagattgtacagctagtaaatctgagtgaggaagtgaactcagatggtctacaaaacttttagcatttgtggccaggcatggtggcttacacctctaatcccagcactttgggaggctgaggtgggaggattgcttgaactcaggagttagagatcagcctgggctacaatggcaaaaccttgtctgtacaaaaaatacaaaagttagctgggcgtggtggcacacacctgcagtcccagctacttgggaggctgaggtaggaggatcacttgaaccaagaggtggaggttgcagtgagccatgatcacgccactgcactccagcctgtgtgacagaacaaggccctgtcttaaaaaacaaacaagcaaacaaacaaacaaagaaacttttagcatttgagaccttcagtgtgatcaaagcaaattagctttgtgaggtggggtttcctttagcttctacgtcagcaaaattgtgaaccaacaggattaaccttttgccgtcttagtactgcagggaactagctttcagaaaattgtttgggggccgggcatggtggcttgtgcctgtaatcccagcactttgggaggccaaggtgagtggattacctgaggtcaggagtttgagaccagcctgggcaacatgtcgaaaccctgtctctactaaaaatataaaaactagccaggcatgttggcgagtgcctgtaatcccaggtacttgggaagctgaggcatgagaatcgcttgaacccgagaggcggaggttgcagtggctgagatcatggatcgtgtcactgcactccagcctggatgatagaatgagactctgtctcaaaaaaaaaaaatactgtttggggacattttggtcctgttttcttccctgacgctgatgtgatgctgatgatagtgagtgtttcaagaaccaggagaggctggttgttgtaaacattcctataaacgttggctcagagattgttaatgtaagtttttctggagcagtgaggtaagccccaagtagaaaagggcagaagtatagtaaaatttggttgttttgtcaactttgtaagacttcagctgcataccttgttaggaaactagaagccggaggaaagttgtgctgagatgtgtagcatttgttcttgctttgtgtggccattttattcccattaagtactgtatccttcactaaagaaatgggccattcagcagcccgcctgaacactgcggcactgtatattgttatagagagttatatccattcagaggaacacaacagatcagaggaaaggaaagaggtaaccatgtatgcagacgtggaactgtccccaacatgtataatagacaagccaaggtgaaatatatagcatactaatattcaactttttaaatttaaaaaactatgcatctcaaggcatggtggctcacatctataatcccagcactttgtgaggccgaggtgggaggatcgcttgattgcctgaagccaggagttggagaccagcttgggcaacatagcaagacctggtctctacaaaaaatacaaaaattagctgggcatggtggtgtgtgcctgtagtcctagctacttaaaaggccgaggcaaaaggatcacttgagcccgggggttcaaggctgtagtgagctatgatcactccactgcactccagcctgggcaacaaagcaacaccctgtctaaagaatacaacagcaaacaaacaaacaaaaaaccaaaaaccctcaaacactataaatccatagtttttatatatgtgtaaactatttctagaaaattactcaagtaactgataattagttatatctgaaggagggtgatggtgcggtggtaatgagactcacttttcatcatgtggagcagtgattcccagtgtgttctgggattctggggagtccttgagaccctttcaggagatccatagatcaaaattattttaataataatactaagttgtttttattctcattctctcacgagtgtacggtggagttttccagaggctcagtgacatgtgccattgcagcacactgaatccagaagcagatacgataatccaactgtgtctggtcaagccaaatatttaagagattttaaaaaatgtaaaatgatgtcattcttctcatgttgaagataaagttatttttataacaattttgaagataaagttatttttataacaattattattcaacaaaattactattatttaatgagttaatacacaataaatttcaaattctcagttttaatttcttaactgggcaagtatcagtttaggtataaacaacatccctccgagatcctctgggatacatccaattcctttagtgcctggtgtgcttggaaggtttctgttgcacggcgctggacaggagtgccaaagaggaaagaaatgtgaatggaaccaaagtctataataaaatattgctttctctttttcccagcctccatcaagggagacctacaagttgcctggggttcagtgctctagaaagttccaaggtttgtggcttgaattattctaaagaagctgaaataattgaagagaagcagaggccagctgtttttgaggatcctgctccacagagaatgctctgcacccgttgatgtaagtaggtccagtcactgaggctctgttaccacatgagattgggagtggtgtggctcacattgaatccccccacttatcctgcctggtgtcacagggaaagttgaacacttggtttctgtgcctagagctgctatcagatgagaagacaatgtatttgactatataggaaatctgttgtggactgtcaattaactcattttcacttccgttgatttggttgtgaccagccctagattagagggcagttttagagtgtcctggcctagaatgtcttcctcagttttgagtaagccagggtatctggcctctttctgggacttctctgcccttacaggacccactggaatctgtagggttccagcgtcaatctgtgttttctaatattacaatttgtttttattttttatttttaacaattattttataagttgttttcttctgggaataatttgaggtgatttagagtaaaacaatacttaatagaagcactacaaccagaataatagtacaagagtcctgtaattatattttgggggaattaaatgtaagaaaacctagcccagggatactgattgcagattcatacagtgcttagctgggactcaaggcaaaaagagaagcatgctatattgcagaacttttattaggaaaccatttccacatatcaaggtggtctgctgcaggtgaattttggtctgaatgggacttctcagttcatcctttggcaggctaaaatcccactgaggatctagaactgtagcaatttctagattgtgtctgagaccttcccagcctggagctccatatctccttcatgcctgtgcctctagcatctagcacagggtctgacacatggaggatgctcagcgagagccctcagattcaacttaggctttactgtattctgcacagcttctggaatgtgtgctgaatgaatgaatgagtgagtaaataatgtgaatgattattgggataagggtggggctaaagtggtattttcttacattccccagaagatttcttcttcctgtcgagatgctttttggattatctcttcctttctgtttattatctagggaatgcctcgctgctctttagcttcctggtggtaataattcacttcatagtttaatgtcttaggtttccttcttcccacagattgccttcaaatttgccttttcttcctccctccctttcttccttcctccctcctttccttcctcttttccttccttatgatagactcttggtatgggggagttaagaggtcttaacttgagccttcacagtgtatattttagaatgaataattcattgctatgcttcaccaccaaccagaaattattacagggtttctctattacatgagatttttcaaacattatttatctatgatttgttctgctttacctttcagaaactatcactgtggtcttttcttcccctgccactggagttttttttttttttttattttttttgttaacagggttttgctctgtcacccaggctggagagtagcagtgtaatcttgtgcaatcttggctcactgcaacctctgcctccaggctcaaattatcctcccacctcagcctcccaagtagctggaaatacaggcacacggcaccactttgtattttttgtggagatgagggtctcactatgttgtccaggctggtcttgaactcctgagctcaagcaatcctaccaccgtggcctcctaaagtgctgggattacaggcatgagccaccatgcctgggcaccaatcttaaacaatgatttccataaattactattagaatattcaaggcatatgctatatatagccttgtcctgtgaagcctgattttggtgcactcctccacccccactgtcatattatccctggaactatctcaaacaccttggctcctccaggaagagtccttctggtcaccaattcaggctcattctctttctgggaacgatcagactgagtatttcaatctgtttagagatttactaagttttagtttcttgtgtttcttattaatagggagaccaaataattcagcatccaatctggagaactaatgaggacaggagaagttattaataggtaatctggaacataaggcatactctggatgggtagccacctgcttttcaaagatcttgcctctttaatgggtactgagagcagaagggtaacaacagcctttggagattgaactcctgaattctgttcagttgtctggggctagggaactctgacacagatattgtagcactgagtatttctaacaagctgtggggggcctgtcccctagtggatgttagagttcccagagggagaagtcaagaccactgcagcaccgacggccccgtgcttatgagatccagtggtggtacccctagtcagtcttcctccaccctctccttcctcttttcccttctcctccccttcttcccttcccctccccactccccagtctgctcccttctctttttgatccttattctctccctctcccttccaacgcccccacctcggctccctcttgttttgttttctctttccatcgccttctctttctccattttcttctctccctttgccattcacagtgtcttcctttccttttctcttctaaaatggctcttccaaaatcactggagggcagctcaaaagagcaactctgccaatattaatttctccttgaaagggaaaagcctgcatttccaattatgacttagtcttcattagttagaaactgtcttttttccacagcaagtggcctaggaatggtgtgtttctcgcaagtctctggtcggaggtcctggttttatgtattctgctgtgcacgctttctagggcatgaagacagggcaggctgggccattggaggtgggggtggcagtgaggatggcggtctggctgtgacaggaacacacctggaaatgtctgcttgtcacagaatggattgcagctgaagtagacaaaactctgtgatcatgttgctgcataaacctcgatgtctgaaatttgggacgatggctgtgccaggattattttagaaaggcaagctcaggatcagtgttcaactaaccagagaatctacagctgctgtggatgtccctccaccagagagagagagagcctagcagaaactgaggagagaagctcttcaggccgctcaatggctcacgtccgtagtcccagcactttgggaggccgaggaggaaggatcacttgagccaggttggagagcagcttgggcaacgtggcaagaccttgtctgtacaaaaaaaaaaaaaaaaaatgccaggtatgatggggcctgcctgtcgttccagctactggggaggctgaggctgaagaatggtttgagcctgggaggttgaggcatggtaagccctgttcacatcattgcactccagcctgggtgacagaatgagaccctgtctcaaaaataaataaataaataaataaataaataaataaataaataaataaaagttcttcaaagaggaatggaggggaggaaccaagggctgacatggacaattctaggtaaacagggctccagaaacattctgaaaagcataagctgagagcagacttcagtaacatgaagaaagaactggggaggaggggagcggtctagagaataacatgctcttatttgttcatgggattcataaactgtggacaatatttttatttaccaaaaaggtaacaaagtttattgagcacctgtgatgtgtaagggactctggaagtattttgaagggatacaaatataaataagagataactccagccttggtttctcatgggctaataggaaaggaaaggaatgaaaaagagaattacactcaagggaggtaagcatgagtcaggacctgacaaatggttgaaggaaggaaaggacacttgtagctgggatgttcaaggaacacatgctttgaatatggagggtgtggagcttgacctaagccttgggggctaggaaggaatttgatatgcagaaggaaagatgtgggtcattatccttggagctgacctaggcagtgaggacccagagtgatctggcgaacacagactgtgctgggcatgtggagtggaggggaggtaggaaacggctgtctacttggggcagaggattgggttgaggagtggtggaagataatactggaaaggaggacacttgccagaatgtggaaagccctgactgttggctgggctaagacatctggacagtctggacaccattttagggattcagcacgtgcgttttacgtgctctagcagggaaggatgactttactgttagagatgctcatttctgatgtccctctcgctgagtgtgagtgcagtcctgaataagattaaaggtgtcataactataaaccatttggaaaatgtaaaaatatatatgcatgagacacttggagcaaggattttctaaggtctcaatttcttgtttttgctttgattgttatagcttataagagtagatttaagggttagccacaaactctattactgtcagagcagatttgggctgctaggtagaatcttattttcactgtttcaattctcatttctttgtaattttttgtattatactacatattttagccccaaattgtgggctgcaggaacaacgttgttaagtatttcttgctggctgtgttcactgaattgcttcctgagcctgaacttgctcaaacttcctgttttttgggcacagaactcctggtttctccatttatgatggatgagaggggtttggagtctctcttctagactttcatagcatgtttcaggatttctcactgatatctaattgtcttataagagacattaaatttttttcacactcaaaaatccatgatcccctctaggtaaggtctgagtctctgtcaaacattttcgcttttgtgtaacatttagcacagtatttatcaggcattattttgtttgggggtagaggaggtaggcggcggtgggcagttgggaccccccgtacttatgttctgctccaatattaagtcttgtagaaaatggtctaaaatagatctttactatctgaaatatcatctagtgagagcattggcatcatcaaagagcttgttaaaaatgcaggatctagaacctcagactaaatcagaatctgtaatttgattggcctttgagacttgctggtctccagatgtaatgtatacacatcacctagggatcatgttaaatgcaggttctgacactcaattacttaggtaatgatcaaacaaccagatcttgaagttttctaacatcaaagcagcaacttcctttctagagttgtcaccggacaccttccctcctgagagtgacacttctgcgcagaacagatggtttatgacaggagttggaaaactgtggcctgctggtggcatccagcctgccgcctctttttgcaaagaaagttttattagatcacagtgacgctcatgtatttacatattgtctgtggcttcttttgtgctgtactgactgagttgaatagttgtaaaagagactgcatgacacacaaagccaaaagtatttactatctgggactttatagaaaacagtttgctgaccctggcttatgtgagtgactctaaatatttccttaaagaatcaaatagctatactctcttgccccagtggcaaacttcgcaagcccatctgaatccatggctattcatagagaagctgaaccataaaccgtcattcccaggcaacctacaaagggtcttgagcctaaaattggtctggataatggtaccacagagcctgtgactttccaacatccatttaatatgtccctcctcaaagaaatggttataattttatataattttattgagctgactccctcctccacaaattgatttcattaattgttcaacataagtctgactttccccaagaattggaatcaaaaggaaattctgagtaaaaatatatctgggaccaaggaaataaaaagacttgtacaagttggttataatacacattttactcctaaaaaggtagcgttggttttggccccactctggcctattcactgggcagactgtatgggcttggagtccttcttttaattcccttggagaatcccaccacctgtctcttatttgggtttttgaattgtgaaatgatggcacacacaagctccaagaatagctgcgtgtgtacaccaagcatacagagacagaaggcagagacttaggccaaggatcaggaaatacagaagagaagctggcatggaggcatctgctccacaaacacagtgaagccggaggttgtaggaggagggaggtgggacccgtgtaatcactggaggatgtgggcactctgctctgctctgcaagtcttggagatcttggttttctttccagaaccaaatttcagaggaggtgggtgtaggagaattgagattctttttcctcatccagagttatctggggccaaagaggtttagggtgagattctgtgggaatctttgctgtagctccagaagctttattcttacttagttccttttccctttgtctgcatagtccaggacactaaaagggtttgtgaagagtccgggtagacataagtggagagtcttctccttaattctagagtctatcttgacttcaaccaattaaagattgtaggagtgaattagagccccttatgttaaaccttgtttcttggaagccctcctggaattccctaagatgcagagctgattagcttagctggtcagaatgtgaaggttttaaagccaaagttattatttgggctgatattttagacattctcttcattggaagaagtacaatgtattcattcattcattcattcactcattcattcattcactcagtgaatatccattgaaaacctattgtgtaacaggatgcaggaaaaacctgaactggagagtcagacacatctgagttcaaattctagtttcttgatctgtgagctaactaacacctcattcagctttccatccaggtgacataaccaccccagcttccttccctgaatctgcaggttaggttggacatttacttctctgcttttgcagcaacttctacaccgtctgttctcataccacattatgtggaaattatccatttgcagtctgtctctctctccagattgtaaagtcattgatagaaaagagcttcatttcacatacttttttacccttagtgcctgacatatattagaaattagacatatgtttattgcactgaaaagaacctaattgtgtggcttaatttccctaaagcatgtgtttctcatctgtaaaatgaaggtgataaaaacatgccttgtgagttttttgtgaagatcaaatcagataatgtttgaatgagtgttttataaatatgaagtgcttgcaaatactaatagttgttctaatatctggattgattgcgattcagtagaaaacaagcagaagagaatcaagaaagtatgtggaggtgtcctagtccactttttctaaactgaataactgaacgagggggatctggagacttcagcttctgaggcacagtttgggtgtgtggggttgacacgggacagaggaccctttccagcaagctcgatgtctctgccattagattatatactcataacagtggggatatgttttattaatttcattgcccctttattcaccctaagcataactaagaaagtgaatatgtaataattggatttcaatgggcattgcaaggccaaagtctcctgccccccaaatctcccagtatccctggcctgtatgtatcttttcttgagaacctgaataatggaaccattagattgaaaacatagattggggagaagagagtgagttgaatttgaaaaatgttgagtgtgacatctggcagtcaaatatgcagggctgactcatttcacttttcatgtgtctgttttagctcacaaactagacatagagctcattgtacagattccatagtgcttaatgcactggctaccccttaaaaaacctatagagcttgctggagggggtcccctatctcatgtcaactcaataaataaatatgtatggatttgttgcaaaatattggattttcttttccatgtaagtaacaaagaactgctgcagatatttgagcagagttgtaaaatgatatgaattttgctgtgagaaaacttgatcttgctgtaatgtatgaaaaagactagaagggaaagaagttgagggtggagagtcttgttaggagggccaggataagagcaggtgggcggtgaaggaggctgcggcagaaccatgccaagcagaatggagtggaggggacttgactacacaagaggctggtgactcagctttctgcctagtattagtcctagagaagtctccctgctctgggaagaccggtgtctagcctcatgtggcttcggaacaaaagccagtgattgcatccaagggaagataatgagaaacacacaggccgtgaaaatcaggaaagcaccactaatctttttgttgcaaaactttacttttcaaagtcctggggaagggtgcagaagcctcagcacgtggacttgagccctgtactcggaaatgcaaaatggaaaccccctaataaatcacagaactgaaaatatccaagagtctgagaggctgggggaggacaggagtgagaaaaggaagggggctggagtactgatcagaagataggagaaagcaacagtgcaaaatgcggggaagggctgagtagacattcaatttaatctggacttttattttgctacaaactaattttatgaagactttttttgcccaaatattaaatatttattaattaaagatattaaaacaggaaaaactgctttcattcaataaaaactctagtaattcttcctaactccagaattgtatgtatatgttttacctattaaataatcagaaatagaaacaaattagacaagatacgtgaataaccttaaaaattttccataatatttgacttaggaactttagttttatgaatgtactctaaggaataccctgaaaaggacaaaatctatacacaaagattatacacaaatttattatagaattatgtactaaaaaaccctaaatgaccagccttgagtatatggttaaatatataagttataagcctttgggttttgagagttttagataacacaagaaggtatttatgatattatattaaatcaagataaaagtcacaatgtaatataaagatatacaatcaatgatgtaaaagtacatagaagaaaactctaatgaaaatatgccaaattgttaactatgatgacttttaggttacggaattatgggaccatttttgtttccttatgcaattgaaaagtcataaatgagcatgcatcactttttcatcagaaaaatatatgagttacatatttttttaaagggaagatattgtaaaggaatatttgttgacagaatgcattaaaaaacctaggtaatttccttatttccctgggattctgagaatttttttactcttgggaatatctttccttgctcttagttattttcatatgttagtcttgttcctggggataaaaaatggtaagtttgctatttgagctctgctcgaacatatggagtagttctctcttacatatacagaattggtttgacattcaaggtctttcagagtcaaatcccaattgatcttcccaatttcacttcccttagtttcctacgtatattttctacacaaatcaaaaaccttttcagacttcctatttcttgtacatgtccataacctcccctttctgaaactctacttgttcctggggacagaatgttcacagagcatgcgttaaacatcataaagtggatcgggagcctcttttaacataaggctgtgtgattttgacaaggcagttagctcaccctctagatctcagatggaacacctgtaaaacaagggactatgttgtagatggttgccaacattccttgcagtgctacagctgagtgaaccttgttccctcatggccctaggtgtgctcattcatctgcctgcaccttgtctcaggttcccactgcatcttaagtggcccctgcccaccccactgtcaaatttgacccttcctagctcatgtaccatttcctttataatgccgtcctcagtgattctgattaacagggacttgcatgtatgatttttttttttttttgccactcatacaggctgccttttatcaaaactatggcacatgtcaatgatataacagataatatcatttgaataaaaagtcaactccatggggaggaaaaaaacctacttaagtgagctttagagataaaggtgaacacttctctaaatcctttgtttatggtctgttaatcaataaagtccaatctgtgatccccagatacataagaggagaaggatatgtagactatttatgatatttctgaaaatcctaagaaaaatcacacacaggcccacagtaagtctatgtttctttattttgagtcagaggatttcttttttccatttttaaccagtataaattggtttaaacttcatctcttgaataactcctaacatgaccagagcccttttcttccttcaaatttccacaaatgcattgctccccttttttcttttcaccacccatatgtccatgttggacaaaaaccatgaaggaaggaggttgagaaactgtgtaccaaaacgccaagagcatctttgccatgttccagcacaaagggcactgttagaaggaggtgatcagagtcatcttctgactcaacctcacaagaggagtcaggttagatgaacagttcccaactatttactctcctctctctctcattctctctctcgcattctttttccttctgttttttattagcagcacaaaagattttgaagtgcttaagggcagaaagcttgccttgttcatctatgcagctcttgctgggaccaagtatggtgctaaacacacggtagacattcagtaagtatttgtggaatgaatgaatgagcaaatgaaggacaggtgtggcttcgatggcaatgggtcagtgtgaactccggaaagagtatgcagagttatagtcaaagtggatgatggatcattgctctgacttactagttatgtaatcttgagtaaacccctttatcactgtgggattaatttccccagctgttgaaaaaatgtgtgtgggggaaagggggagggttagtgattaaaaatgtgttccataaggagcatgtatgtaaaatcatctggcacatggttgcagctgaatagctggcatttatgtagcactttattttttctgcattttttaaaaattaaaaacctgaaaattgttaagttgtactaacctcaaatctcaccacttaagaattatataaaataagaagtaaaatttctcttcccagccaacttttctaattccccagagataactacttttcttaacatttaagtttgatgtttatccttcttgacatttttctaaagtttcatatatatatattttttataattatttaatatatatgtaaactcatgaatatatatatgcaaactcataaatatatatatatatatctccatgcaactttggatggagatatatatacacacatatcattttcaaaatggaactattcatatatgtctatctatctatctatctatcaatcatctatctatctccaagtcaattatttttgaatgatggcagaatcatttgttgtttgaatataccatattttgctgccagtcccccagttccagtgttttgtgattacaaacaataatgcaagggtcttccttgtacatctatatctgtaagcttttgtacagtacttactttagtaataaggcacttgaacacttattattctctttactcataaccaccacaagaagaaaggacagaaattgttattctgtgttacagatgaagaaaaaggagagctaaagggggcaactggcttggccagagacccacacagatagactatggcagaccccgtgtttcccagtggcttgaatttttgtccagagctctttttgtcacactgcaataaagcacaagtcaacaggaaacctttacaaccaggcagagaagcttggatcagggagcaggcagtcacactaaattgtagaaaagaacaaacacacacacacaaacaagaagctcgaggccaaacacatttaaaggatattatttggaagaaatgcactggtggtgagtgagggaccagcataagaagagctgtcctttaactagttaccatgttttatgcaatgttctcaatatgatatccaaatgattaggatggcttagattgcataaatgaggcaggagaatgacaaaggacacccccacaaccccaacaatgacactacccctctccctcaagggaagtgtctagggaaggccagtcagcatctggttaggcttggccttaattgtcatcttcctcaattatctgcaggaaatattagctgttattaaaatttgcagatgcagtcaattgtcagagtcactggagaccaagaattattactcagagcattggagagaggctggaaagaaaaagaacaattcagcctggaaaaatgcaaactaatggataaagtgaggtagggggagtgggggaagaatttagagggataaggccagtagtagggtgaggcagtgaagcactcccctggagtacaaactttaaggggatgccaaaaactcagctatcaagataaataaaattttaattcaatattgaaaaaaatcaagttggcaaatgacagcctgtgggccagcagcctgtttgtaaatacaattttattggaaagccactggaagtaaaggtactgtggcaggggagatccaggctaattctttgatgtgaaaaccctggttaggcttgtgaatgttagacacattagaccttagcttgtgattgatgggaaaaatatttctgaagaaaaggaataatggatctgactgcttttatgggtttcctggggttactgtaacaagtgatcacaaactgggtggcttaggacaacagatattgattgtctcacagttctggaggctagaagtccaagatcaaggtgtcagcagggccatattccctctgaaggttctagagaagcatctttctttgacatctaatttttgatggctcttgcaatcactccaatctctgccttgatgtttacatactcttcattgtgtatgtctctctgtctttgtgtccgtctctctgtctttgtgtccacatctttttctcctttcccttagatcctagtcattgggtgacatcccaatccagataacctcattttaacttggtaacatctgcaaagaccctagtttcaaataagattacattcctaagattacctatgaatataaccttaactctttggttccttatttggaaatagggtctttcttggacacgattcaacccaccacactgttaaagatatctttctaggacacaattcaacccaccatgctattaaataggtagggatggggagagatttgacttaggcgcagcagaaacattatccattcacagaaatctggcagcggagtcaggggcagactcctgacatgatttaaatacctaagaaaatatttaaggaaaagtactttagttcctttggggcgcaaatattataacctttgctcatgtcacatggtgacaaatacatgcaggatttttaagggtagttctgatttcaaacatgcaaacaatagtgactggaaatatttttactaaattttatattccttttgttactattttattcttctcaatgtaagcaacttattaaattattactataaccgaatataacaacttttagatatttttcacaaaaattcaccaaccggggaaaaacgttgtttgtaaaatgcagtattctgatttttaatttatgaaatatggctgttatgcttctgaagcctgttcaaaggctatgaaacaatggagatgatcgaataccattagaattttaagtaagttgaaatgtaaatgggaaacaaatctattttctcccattttccaaacacatcacagtcaagtccaaaaatttgaatgttacatggctttttagtgaacacttttgttataaacatgcgtgtgtaggtatacttaattgtatcagcaacaataacattagttattttaattattgtatcaccaatcctaatcactaatcaataaatgtatactcattaattaataattcaataataatggctaatatttatgaagtgcttatgtgctagacagaagaattgatccctttatgtgaattatttaatttatgaatacagtaattcttccttagaattggtattctgttcatttgggcttgaaatgttctacatattatttttcctgcttttggtcaggagtcaccagcccatttaaagagagacagctgtatctttctgtaactgggctattttctctatgagtgcattaatgttaacagagaagcatggccagcaagggctgctagcacaaagtgaagggccctgctgtgatgaacagagaaattgggaactttatcattgctgctatatacattatcaactaataacacgtttttaaaattcctgaaaagagtttgctttctaaaggttaaaaaggtttaagttctccctgtaattttgtttatatagatgatttgctttgtaaacatttgttttgtttgtttgtttgtttttgagacagagtcttgctctgtcgcccaggctggagtgcagtggcacgatctcagctcactgcgacctctgcctcctgggttcaagcaattctcctgtctcagcctccccagtagctgggattacaggcatgcgccaccatgcctggctaatttttgtatttttagtagagacgcttcaccatgttggccaggctggtctggaactcctgacctcgtgatctgcccgccttggcctcccaaggtactgggattacaggcgtgagccattgtgcctggcacagctctccattttaaggctttgcaattgattgaatcaggctcgttcaggttacctaggatgatcttcctcacgtaaagtcaacccatgatggattctaatcggtctacagaacttcttcacagcaacacctagatcagtgtttcagtaactggggtctacagcctagccaagctgacagatcagaagagccatgacaacaatgataaaagaaactgttgccctctagtttcctcctgggcattaataatttagctaatataaacccaaatactttggatacgattgactgaattcagctttgctgatgcctctgatttcagttgctttaaccaaatgcaaacccctagtgcttctgttgtctgttgatacccagaggctcatgtgatctggaagggtaagtggcttctctctgatttgccagaagaaagtggttatgttagctgaggagccaggacactaatttcagtgatttgactctggtacaagtggtgggaggcccgagggtgggatgctgctttttcctttggccctggtaaacattttatgcttgttatggtggttgaaatgctgtatttaaccttttcttcatgtgccaggaggttcacagtaaatgaggggtgtggtctgtgaagggaaaagtggctgtggcttggcctctttgtaccctgtcagcacacgtacacgcatggtctgtaacatgtgaacctatcacgtgggaactcattactgagctgtgagggctgcccctgaggagctgggggcagtggtcgggagaggagaaggtcgtggggcacagtagaaatggcaccggactgggaatgagttcctactgccaacttctcatcagctcagttcctacagtcctctacttactccttcgttgcccaggacatttatttaatgccaggctaagcacaaggcttccaggattcagcagtgaacaagacagatgctacccttgcccttttggagctgactgttgagcaattttaataaatagcaatgatcatatcattagcatttcccgagggttaccatgtcccaaatgtgtgagttatgatagaggaagatggggttattctaggtgaaggccgagaagcttctgggaggcagtgactaataactactgccttttttactttggagtcatgtcctttctgtgactcccctttccttctcctctgtgttctctcccttggccttgtcaggctgcccctggctttggttctctcttcctagtctcctttctaattagcctttctagcccaataaattaagctcttgtctggaatctctagctgcctgatggacacctcctcgtgaaagccctcagtatctcaaagacacaacatctgtgaagaactcaactcttccattgtattcttccttccctttcctgtctctgataatgttatcacaattcgttttgtcatttaggtcaaaaacatagtcatctttgacctaccttccctatcatacctaccagtcactcagccctaccctgtctattcccatgatgtctctcatctctccctccatttgtttgtcactctcaatggtcagactgtcttggtcacttttctgggcaattgctatagtttaatgcttgcagttttccctcaactttagttcatcctctttagagctaccagagcacatactcttgatacatcttcttgcgtcactctgttgctcaaaagccttcagtggaccactgctgggctctgcagccaggtgcttgtgttctaaacctggctctgtcacttaccagcttggtaactggcaaattattaaccattctgtgcttctattatttcatctataaaacaattgtgtctgtctcatagagttgtgatggggattaaatgagtcaacatgtaagtagtgcttataaaaaaaagtctgacataattttagcattccgtccaggtagatgctctggctcctggtcctccacattttccctcttgtgccttgactttttgcatttctaacttttccctgttatatttctgaatagttttttgcaaagtagtgcacaaattagtgcctggatctacacaaactacatcatacatgatgctcttgtctttcttcatattcttttaaagactatatgttatatatttaaacacatatgcatatttatactaaactaagtatatatatgtatacacatatatacatatagattcatgtatactttattgtttcttcattaattgaccaaatgttttgatggtgcctctaaataagtagtacttaggcaaatctccactcatagtattgtggtaaaagattaacttttgaaaactgcccagagaacagctttctatcacattaatcatgagatacagttttgttttttccaatgttctggcggccattctcatgaggatggactgtgctgactgatctcagtgaaagttaccagtgggcatgttctcggggcctctctgtccccatgaagcatccccactcagagacatggaaaacctgtgagatgagctcatacaaatgatttctgggatgaaaatagcaatgtgagatagtgccaggaacttcaggttcacagagtataattaagatttttcctgaatcattgcacactgtaatttcatcacatcattatgtacgttctttaattatgggctctaattgcccattttagttctgtaattagacataaagacattaattttgtaggtataacaatcagctcaaatgtacttccaaattctttcccctacctttcaagaaaaattaatacatcattaaaaagtttgtgcacagaagagcctcttagagggcagcttttgggagccagttggtgttctcaaaggtggggccccagttcagaaagggtatgggaacatcaccctcttatattccccataaactgtgttgcttcatgtcagatagaccctactgggtccagggcagggaagagctccattaattcacatagggccgatttctcttaatcgtaaaattttaaggtgacatcaatgcttaatgagtcatgggagaggaatgaactaatgttagggcaactctggctttttatttctcttgtgtcctattaaaagatgagaagatgaagcattttaggctcatggggtttgtatttttcatttgtgcatgggtagctgattatcatctgtcattatgtgcgtgtgtgtgtgtgtatgtgtgtgtgtgtgagagagagagagagagagagagagagagagagagagacagcaagagagagccagaatctgttttttaagaactctcaatgattcagatctccattttttcccttcacctacagcactttagttaaaacaaaacaaaacaaaacaaaacaaaaaaaccgacgagttccagcatttccccccatggaccatgctatgtccatttcagccgacacattttacatgtgtatctatttgcctccacttacaaatccaaggaaaaaaaggcagtgtggtagagtagaaagagccttagtaagggtcctggcccctttttcttccctttttacacatactctctctctaggtaatctctctattctcgtccttaaaggccgtttatatgcttttgtccctccaatttatatctctagctcaggcctcatctctgagctccagattagataacaatcagaatgcttatttctacttggatgatttacagataatttaagcttgctgtgttcaaagctgggtttactttcctccaaatgtattgcttttctattcttcccaaactcaataaatggcaaaaccatccattcaagtactcaagctgagtcatccttgattattctttcgacatatgagccatcagcaaggcttgtttcaccctccagaacctatcttcaatctgtctgtttccctctccctcaattcaggctgcaatcccaatgcagagtgttcagtaaagcaaaaggggtggtctgctctcaccaaaagcaatttgcgtgctcttaattcacggatggattacctagcacttaacacagacccagatatatttggtactcagtaatatacactgaagaatgaatgagtgagttaatgaattaatgaatgaataacagaaactctacctcctaggacttaataatacacagcaggattaacctgctttcataagtaatcagtgaacctggtaaagtgtgacatttatcttttggtgaaagcagctcaccccttttgctttaccgtttcaccagcaatctctgttttatttttacctgttcttttggacacacaatttagtcagaaatttgcacctgagtcttacttctgccacctgctagtataaagatcaactggtgcagagcactatacagagattatttattgtttgctacaatgttggatatagagtttcctctctaggacctctttaactgggagggataaaaatggcacaactaaattttcatgatttggataagaagagaaacattgggtgggcatggtggctcatgcctgtaatcccagcactttgaggggctgaggcgggtggatcacctgaggtcaggaatttgagaccagcctggccaacatagggaaaccctgtctctactaaaagtacaaaaaaaaactagccgggcatggtggtgggcaccggtaatttcaactactagggagcctgaggcaggagaatgcttggactcgggaggtggaggttgcagtgagtcaagatcacgctattgcattccagcctggccaacaagagtgaaactccatctcaaaaaaaaaaagtagaggagaaacattgcttcattcagaaagtgcttcctaagagattcccatggtccagggatgatgctggatggtggagatgtagaataatgtagagattacagggtagcggggatggggatgcacttgtaagccaatgagtagaagaaaggggttctggcggtggcacagcagcaaccacaggacgaaagcaactgcagaggacatgtgctcaattctgtgaggggacgatggcgggacatggaagggtcctgatcatgtcgatgttgatggcaagtctaccagtcaaaaggaacaggtgagcaagggcctgtagcctggaggtggcttggggctttcaaggaaccactttgttagacctgctaaagcatgtgtttcaaagagaatgtacccagctcgaagacttgcacattgtaggcacttagctaatatctgtttaataaatggataagtgaatataagtggcagaaagacagctgagttgctgggacaggtgagatcatggaaggccttgtgtatcatgctaggatcagtaatgggaagtagagaagtggtcaatgaagttttatttaagcagaaaagagaccctattgggttgagttttagaaaaacccctgtggctgcagaaaagaggatggtttggtgggaatgagactgaagtcatgagcacagacaggaagggtaactgaacattttgagagagctgaaagtgtagacaggaagggtgttcaaagattgttggagttcagagagaagtcctcggcctggcctagcagtgtagacagccaaagacagacaagtagtggaatgtcacattctagtaactgattgaaatgtgtgtgtgtttataggcaagtgagttgaaaactgtgtgtgtgcttaagttggaatgtacatgtgcatatatgaaggtgatttgaagtgtgtgtgtgtgtgaatgcagtgtgtggtagtgcattggaacgtgtgtgtgtttacatgagtgcaagtggacagtaagaatggtgtctaacacttacctatttggtctaaaggctcataaaacttctgccttactcctggtcacatgctccaagtcacaagcagaaatgggcagaacagctcggccttgtaattccagcctgactcacactaagctgtttccaaccaagtgaattaatttctccctccttatgcccacacagcactttcctctacaacaattgttacaccactgttgttattagtttatataatactttaccccctgctaggctgtgaaatcctgaaggaggagaaaatatgttatgtatcatttatctccagagtctagctcattcaggcacatgctaagttctcagctaatgtctgttgaacgaactaaaagaataggcacacttttatagcttattaagctcaaacatagactccaaagcaaaatctcatcattgcctcttgcacattttggaaacaacagcaataatagttaccatttcttgagaacctactgtgtgcaaggcacagtgccaaatactttgggggagccagtgattttatgtgcaatgtttttaaaagtccctggagttaaaaaattcctaggaggtaaatattatccaccccttccacagatgacggaagtgaggctcactaaggataagtaacctgccaagttgcacagctagaaagtagagagctgaaacaggaactcaaagcctgggctccgaacaagcacgccctgcagacttcccttccctgtgatgccccatgctcagttttctattttctttatagtggaaaagtcaatgcccttcctatgagaaataaaagggtttaaagtggtcaaaaggaaacagtgtttcctctgtgctcacggggttttggccaatcacagagggtgaaccaaaaacaatattatgcgagatgtggccagtttgggttgattccagctttggatgctgtgagctggatcccaggagcacacgaggaaaaacgataatagcatacttgagatccaagcccatgttggggtgaggatagaagttttgctttcctcaaactattgcatttttcttttcctccctaagggtccgggcaggatgcttcctaccccagggggccacttccaaatgctgctctgtcacttggtggaaaacttcaaatttactgagggtttactgtggaagacttagtcaagagggcaagtaccctatatctccagattgctttgcacatgttggcattcaattaatattttatttgtcaatggatttaatagctgattacagtttgcaatgctctactcatggataaatcagttgatcttctcaggcttcttatgccttttcccagtggatttttcattgtcgtggataaccccaggaaaaagaggaggcacagaggaacctctcttacatgaataggtggggggatgcaagggaggacttctagcttttcttctcctgacttttctacattccccaggttgagtgactcgtctccatcttttaatttagcatcttggaactgaacagcacctcccaagcaaccctcacctgggaaccaggcagaaacaagtgaaaatgtggaggaggtgtttatgaatttttgggcagtcagtgatttcagggatccaggaagttattctactttctaaaccacttccccacctgctggatatgaatgtaactccctcagctttcagctttcacatctactttatatacaattctatactgcctctcccattttatattatttatacctatgtgctgggacttgagcaaaggtttttttattttttatttttttttattttttaaactttgtacaagggaagccataaagaatttgggcaacttgtagggaagagggagagtgaatttggtgaaaccgaaagtcagtaaaggtcacatgggagatgctgagctctgcagacagatctttcaacgtgaagcagcagtgaagaacatggctctggagtcaaactggctgagctaaagagttgactttgttacctactagttacctattggtagttacctactagttatctactagttacctacctctgttacctactagtgtgaccttgggcaggttaagtaacttctttgaacttagtttactgatacataaattagtgataataataattcctgtctcataaagttaccgtgaagattaagtgaggcaatgtatgtggagtgttaaaacagtgcatgacgcagagtaaacacgttaaaatgagctgttattaatatttggttgctaaaggtctgtcctacctgatgtgtctatctctttcaaatacatcctctgggatttagcactagaaacagtcttgcagaaagttagagcagggaggaaccctcaagatcatctaatccaaagtcctcttttgtaaatgaggaatcactggcccaaggtcacggagtaagtcactgagtaatccctctggtctgttgcccagaatgcattccttcccacaaatctggccatgcttgtcctggagggcagatagactagccttccccaggtaaccttgtatcttcccgtaaaaccgtctgtcctcacaaagtggcacaatttctaaggctccctcgggcaacaaagtaggttgtgttcagagaccagtgaggtggagaaactgcccagccactgaactccaggctggacttggtgagtggcactcagtggagtcagagtcctggagacctgcacatcagggagagggtcctgaagaggtcttgaaataatttgacatggaaagagaaaatacaaattttcagagacacagataagcatcatatttttaagccaagaactcagttatatttttgacagtgtggtgtctacagtactaaggcatgttcttacaagagtgacactcactagctcttttttttttttaactttcattttagtttcagtggtatctgtgcaggtttgtcatatagtaatggggatttggtgtacaggtaattttgtcacctgggtaataagcacagtacccaataggttttttttttctgattctctccctcctcccactgaccatcctcaagtaggccccagagtctgttgttccactcctagcatccgtgtgttttccttgtttagctcctacttgtaagtgagaacatgcgatatttggttttctgttcctgtgttaatttgcttaggataatgagatcatgttctctgacatggaaagagaaacacacaaattttcagagacacagatgaccatcatatttttaagtcaagaactcagttatatttttgacagtatggagcctccagctccatccatgttgctgcaaaggacatgatctcattcttttttatggctgcatagtattccatggtgtgtatgtactatgttttctttattcagtctaccattaatgggcatttagtttgattccatgtctttgctattgtggatagtgctgcaatgaacatgtgtctttatggtagaacaatttatagccctttgggtatatacccaataataagattgctgggtcaaatggtaattctccttttagttctttgaggaatcaccacactgccttccacaatcgctgaactaatttgcactcccaccagcagattatgtgttttttttcaaccttgccaacatctgttttgttttgttttttaataatagctattctgatgagtatgagatggtatcttattatggttttgatttgcagtgctctaatgattagtgatgtcaagtatttttttcgtatgcctgttggccgcatgtacgtctttttttgaaaatgtctgttcatgttctttgcccactttttaatggggttgtttggtttttccttgtaaatttgttcaagttccttatagattctggacattaagtctttgtctgttgttcccctcctagtttgcaaatattttctcccattctgtaggttatttactgttaatagtatcttttgctgtgcaaaatctttttaattagttctcattggtaaatttctgtttttgttgcaattgcttttggtgtcttcatcacgaaatctttgccaagtcctatgtccagaatggtatttcctaggttatcttccaaagtttctatggttttaggttttacatttaagtctttaatccatcttgagttgattttcgtatgtggtatataagataggggtccagtttcaatcttctgcatatggctagccagctatctcaatatcatttattgaatggagagtccttttcctagtgcttggttttgttgattttgttgaagatcagatggttgtaagtatgcagcattatttctgggctctctattcaattacattggtctatatgtctgtttctgtatcagcaccatgctgttttggttactacagccctgcagtatactttgaagttaagtcgagtaacatgatacctcctggtttgttcagctcatttctttcttgttgaagacttcagttcaatggccttagtcatctttggaatggcatttaggattcagttcaatgaccttagtcatctttagaatggcatttaggaaaatggactcctttaccaaaaaggtgaaaaagaaaataatataacccaaccttaaagactatttttttaaggggagagggagaggactttattcataatcctatcagctgaacacattccagtcttcttctataaaaacacaattttttataaagttgaaattatggagctaagacatttctaagaagacttaatttcagttagggacttgctgattatctttgggtaagtcagtctggcttcttttctgggaggagtgttgtgtccttagagacgtgaacatcgacgtctgcttgtttttgtgaggaagcatggtagaatgaagagaacgctgtctggagccaaaagatccagattgaaaccagactttaagcctgggctctgcttccccttttgctggatgaccttgagacagtgtcttaaccttcctggatctgttttttagcttttataaaatagatcactggcatatcagcttgttaacgtgcactgtactcagccttgacacacgggagaaaggttttcagggacagggtgaagatttcatctatatgacctttgactgcagtttggttggttgggttacacaatctacaattgtagattgattgagagtcttttgaaatatgtttttctttatgctagttacccaggtcctctcctctctggtgacagtggtaatttaccagggcattgtgtcctcttttcattaattaggccactcaggcctacccgaatcccaagagaccatttatggatgatgaaggtggtaagatagggttgtagtatgttggacctgctgtcacaaactaccatatgcagggtgacttataattaagagaaatttatttttcacaattctggaggccgggaaatcctagatcaaagtgccagcagatttggtgtctggttaggcctgcttgctggttcagagataactgtcttcttgctgtgttgtcacatggcagaagggggaagagaactctctggggtccttagtataagggtactagtcttatccacaagggctctgtcctcatgatctaatcaccccacaaaggcttcaactccaaatgccatgactttgggggtcagatttaaacataggaattttaaggggacacaaacattcagtttatagcagagagtgtatgttcacagcacaggaaggttcacagctgaagcgagccattaattgtgtatagactttcatgtctctgctctgattcattgtataatctgcttcattcaaaggaagaaggtaaattttgggtccctcttggaacatttaggtgactcccaccaaatacaggatagctttgagttataacgtcatgaagtccctggtcatgtctgtgtgtttgctttggaccagacccaagggcctgtcctgtgtcctgcccgggctcctcccacctctttcctggagaaacccacagtgagagtggagggtgggggtccatgtttatcttggtgggcctcactggagctggacactgctgctctgtttgcccaggcttaagtatgcatctccttttttaactggccagggactttcccccagtcacttggcctgccattgatttgggacttttctgcctaaaacttctaggatgataaggagagcactattacccactgcctgcccaaacctagtagcaacagcagctagtcatgaccagcattcatggctgcaagtactgtcaggccaggggcctgaccagtgaactggaactttacttctctcccaagtgggattagagttcactgagtaggtggccctattaaaatatgtatagcctgtgctaaagttaattctaggggtgagaatgaggcagctctgcttgctggctagcccaggctggcaaagaataatgggtgcaagcaagaataccagagccagattgggttcaaattccaattctattgcttcctaggtatactgacttaggcaagtacttctatttctctgtgtctcagtttcttcacttgtgaaattttcatattttaaggattttgaagatatcattttgaggcttaaaacaatgtatttacttatgtttaacacatgtaattactgatgtttaacttttttggacttataaaaatgacaatgtttagcagagtgctttaaaaacatgacccaactatgtgctttctataagaagcccctttgaatataatgatatagccatgttcaaagaaaaaggatgaagaaagctatattatataaacattaattgaatgaaagcaggagtagctatattaatacatgtgaaaatcctctacaagatattagcaaattgaatacaaccatgtacaaaaagaattacacatcatatcaaattagatttattctaagtatgcaagactggttcaatattttaaaatcatgtgattatattaattgatgcagaaaattatttgacaaaattcaatattcattcatgacttaaaaaaaactctcggcaagttaggaatagaataattacctcaattaaaaagtttacagctaacatcatactttgtgaagaaggacttaatgttttctccctaagacagggatcaaggcaagaatatctgctcctgccactcctattcaacatagcactggaaattctagccattacagaaaagaaattaaaggcatacagattggaaaggaggaaataaaactatatttgaagatgacatgattgcctacagaaaaaaataccaacacatttacaaaaaactctcctagaactaataaattctcctagaactaataagagaccacagaatacaggctcaacaagctcaccggatacaaaaatcaattgtacgtctacatacctatattgaacatgctgacaccagaataagaaatatagtgctaattttaatcactcaaaaataataagtgtaagtacatttaaatatattatatttgtaatgtatattatgtaagtttaaatataataaaacatacataggacttgtatgttgaaggctacaaagactgatgaaagaaataaaaagatctaaataaacagagagacatactatgttcatggaagtacttgacatagtaaagacacaatatactaaagatggcaattctccccaaatcaatatatacatttaatataattcctacccaaatctcagcaacgttgttttttttaaaatagatagaaagaggattattctaaaattttgactaaaggctgaggaaccataatagctagaacaatttttaaaacaaactaagtgggaggaatcagtctaccctatttgaagacttattatatagctgtagtaatcaaggctgtgtggtattgacagaagtacagacatagatcaaaggaatgcaataaagaattcagaaatagacccacacaaatacacctctgtgttgccttatttttcagaaaagctctagactcagagtcaggaagcccaggtttaggtccttggccttgcacaagtgagttcttccagttataaaactttgattttctgggtctaaatcacttaaacttttctatctcagttttcttttctgtttaagggaacatccttccttcttccttccaagcctctatttgacaaggatgataaaatatctttcttttttaagcataaggaattctacaaaccaaaagaattattacattggttgatgtgaataacacatctcaacaccatgaggccctgactccgcaaacctgaagtcaaatgccaagaactttcatgaaatttattaatttattttttcttcccaactaacaccactaattctttatttggactccttaaggagcatgaagaatgggactcattcttgcagaactgtttttagagtttgctactgctcaaagctcagagtttggccatgtgaacttctgagaagtctgtgaataagagattttacagcaatttaacagtggttcaaagatagatgctctgtctcccagtagaatacttgtgcttgtgtgggcagaaaattcttaaaatgattcaaaccaaccacccaaagaggattatatgtaaattcatattgtgtgggtcctgggagctttgaaaaccacatacacagagcacagaaacacacaaacacacccaccaacacacacacacacacacacacacacacacacacacacacacatacatgaatagcacccttagcaccattgctaccttatgtgattcctaccatgaaaatctgcactttaaaaagcaggaaaatttgaaatctacagatgtggataacactcaaacttgaattgggacacaagaacttttccctctcaggctagtgagatagtatggcctagtggctacaagggtgaattctggagataaattttctgggtttaaatcacaattttacctttcattaactgtgatttggggcatgttttttaactattgggtgccttggtttgctcttcagtatgattggaataattatatacaaaatatacaatatctatctcacagtattgctgtgaggatttgaagaaatcatttatactaagcttttatgcatgaaatatatttagaacagagtgaagcagaagtatctgtgttctttcatagaatgtatgaatgaaatgggacagtgggtggtcactgccttaaaatactataccatatattttgtcatggtgctattgcaacaatactcctaacattatgtatttctttatttgagtcactgaaatacaaatatgttctgagaagagtcagcagagtgatttacaaactagctttttagactgggaggcacactggagatccaggttgggggcctgggtctaatctcagggctctacttttttaacaaggtatataattgtggacaagtcaactggtgttcctgaacctcattcttacctgcacactgaggaggctgaactgggtgatctcggaggtcctttctggctgtaatatcctaagagactggatgctccctaggcaaggaaactgttttatcgacgtacatactgtggaagcttactaatgcaagtctttattaagtagtttttctgtagcagccgcttttctaagccctttgacctatttaacccttgcagcaatcctatgaagaaggatttatcattatccccattttacagataaggaaactgaagcagacagaggctaagtgatttgcccaaagaccatatggctattaagtggcagggctgagattcataatccagtaagttgaggtacgcacaccaggcattctattcagcatcagacagtgctaggcaaagaataaccgaagaagagggactgtgttctattcactttgttttccccacagatctgtaagagtgcctggagctttttataggttctgaatagatatttatcattcttgcagtggcttgatcttggctcactgcaacctccgcctcttgggttcaagcgattctcctactttatcctctggagtagctgggattacaggtgcccggcaccatgcccagctaatttttgtatttttttttttaaattttattttaagttctgggatacatgtgcagaacgtgcaggtttgttgcataggcatgcatgtgccatagcggtttgctgcacttatcaacccaccatctaggttttaagccctgcatgcattaggtatttgtcctaatgctctccttccccttgccccccaccccgtgacaggccctggtgtgtgatatcccactccctgtgtccatgtgtcctcattgttcaactcccacttatgagtgagaatatgcggtgtttggttttgtgttcctgtgttagtttgctgagaatgatggcttccagcttcatccatgcccctgcaaaggatatgaactcattgttttttatggctgcgtagtattccatggtatatatgtgccacattttctttatccagtctatcattgatggacatttgggttgattccaagtttttgctattgtaaatagtgctgcagtaaacatacgtgtgcatgtgcctttatagtagaatgatttataatcctttcggtatatacccagtaatgggaattttttgtatttttagtagaaatggggttttgccatattggccaggctggtcttgaactcctaacctcaggttatctgcccgccttggcctcccaaagtactgggattacaggcatgagccaccacgcctggcctatcattcttgtttttgttgacgacaaaaagttgttggattaaattgctttcagccttctgggttgctaagtgttgcagagttggctgtgttaaatttcattttcttttgttaatgttacccacacaaggtgaaggttttggttggggctcaggagggctcctgactggggagaaagtgggaagatccagagcaaggagaagacaatgaggctgccaggctttgggctgctctggcctctctgctgcctgccactgtcttcatgtccagcctcgctgtgtttctataaaggtggagttgtacctctctgatttcccctaaaggtggcctggatgtggtagaagaaagaggaggcaaggcattacctgcacctggaatactgatgagtggtttgctctttcttgtatgcccagtggcctggtcttaagcctaggaataaatgtagtcaccatggccataaaacggccccactgctgggcttgctttccctggcctctgtgagttccatgctcattatatggactccccatagcaacgttgagagcttgcttatcatttccagaagtgaccatggcagattaggaatatatgtttattttgaagtgggtttttttctttttaaattttacacattgttggatgaacataacatcaagggctgctttcccaactgtcttaggaaaagagctctaatgttggagccagtagccctgcgtgttctcatcccagttttgattataactgactataatactgtaatgacactctgacctgtgttcttttatgactgagatttccggtggggatggaggaggtgtctgatgtacagaaccagggggatgctgcctgagccaggttggggacggagagaagaggctgaatttcaagacactgacatcatcagtactggccctagtgcagttacatacctggtcctgcaacaaataatgagtatttagggcacatatgccaagcattaatggggtcacgaggtggatcgttcttttgggtgcccttttatatgccgctgcaatcagagaagcaggacaccatgtaggtgagcatctgctgttttcacagctatttgaagctgcaacccagtgtactaaaagtttccaggctgactcagtccaaaggtgactgttttggaaactttgaatgagattggttcggcaacttcagtgttatgtaagtaaaaggatgagagcagttgaaagagccactgctctggacatgttctaagtggcttctaccaatgggaatacgtgagcgtgcattaagaatgtagcaagtgagactgacatgtctccagtacaagcacagcacgtacaaggacacaacttcatgtttggttcaatgtgagacttctctgtggctcctttctcttcatttgcacagatatctgtaccacccagtataagtggtatactaatcgtagctagcctgtgctgcatgcctgctattttctgggtaattcccatgtgttttacacaggttaactctacttcctctcatggaaactacttgttgtcgaaataatggttatattttaccaatatggcaactgaggcacagagatgttaagtgtttcagcccaggtaaataagtggttcaatcaggatttgaactcaagcagcacctaccttggagcctaagctcttaaccacagcacttcactgaacctataaaatacatgtttattggttttaagctctgctagttgaagaacatttatacatgtctctattaaaaattcacttgtgtgtgggttatgaattcacccataaagaagactgccatgacgcacggaggaggggtgtctgtggagcttcaggagacgtgataatccacaaactgtcctgggttgaacttagctattattctgccaggaaactgtctggagaaggtccaggaaagtaccaagaagtaaagaagtacctgagagtgctcagctcccagtgtgtcccttggcatctgccagtcacagcttggttggttctggctgtggggccggccttcctgagacccttgtcagggggctcataccctggtgctctgttttcactgatgatgaagcctcagagcccttggtcccctcatgatgttctgcgggaaaattgtgcacacttttgttgtgtgacttaggttctttaactcaggctggttgacatggagcttggttccagtgatcagtgctggctttagatatgatttgcgcatctctgcaggctagtgtcacgctgcactgtggatctggactgtggctcgggtgccagttgcaacatagtcttcaaggatagccaatggcgagacaacagcactctgtcatgcagctgaagttatggaaacacatgatgtcacatgaatgtctattgtgtgaggtgatggttaatacctgtgtttccaagaaagtgccaggtactggctagtcctcaccacaaccctatatgtggtaagggcagttattaagcttattttataactgaagaagcattagcaccaacagagaagataacttgcccaaggtcatacatgaaaaccaatggagaaattaaggtttcaacctaggcagttaaggcctaaagtctgtgctcgtgaccaccaagctatctcaccggtcccctgtcaggctttttaggggataaagtacagagtaaagtagaactttcctcaaagactgtcttattggtctcacttatttttttttttgttagtctttgggtttactttaaattgatgggctgctggaaaaaatgtaaattgtcatttaaaaagaaggcatcaaggttttgtcttaggttaatttttcaaagggcttaccaagaacacagaagacagaatgccagctgggtgccgtggctcacgcctgtaatcccagcactttgggaggccaaggcaggcagatcacttgaggccaggagtttgagaccagcctggccaacatggtgaaaccccatctctactaaaaaaaaaaaaaaaaaaaaaaaaaaaaaaaaaaaaaaattggccaggtgtggtggtgcatgcctgtaaccctagctgcttgggaggctgagttgggaggatcccttgaacctgggaggcagagattgcagtaagctgagatcatgacactgcactatagcctgggtgacaaggcaagacaatgtcaaaaaaaaaaaaaaagacagaatgctgagcaattaagaactactttatttagtcctgtcttatcatttgtggcctttgtgtattgagcacgtcctgagagctgggcactttctaaatactttacatgtgtttcctcactttatgcttgtaactgctttctggaagcaggactgtgattattcccattttatggaagaaggaaatgaggttcacgaatattacataatctgctcatagtcacaaagctagcaggtggtggggctggcgtagaaacccaggcagtctggctccagagtccatgttcttaattaaccactcctctagggtggaaagctcactggttttggggttaggacactcatgccagctctgccaaaatgtcaacatgtgtgacactggccaagtcatatctcctcttgggttctcattcatttatttactgattcattcagcagctctttccagcatacctaccatgtgctaggcattgttagtactagatacataacgggtgataagatagatttcctcgatgcttctgtagagtttacagatggattttcagtttcctcatctgtaaaagatgagaattaaaatatatgaatgtttctcatcctttacaaaacccacacatctttttataaacataaaaagttatgccttccctaatgttatttgaaatttctgagtaaataaccatgactaaaaataaattaaagcaattataatagtgagtaatttttgtttgaatcacacaagccctcatgcctgttcctgaggagattctcctgcgctggccctctgagccctgggcattctttcggttaagaatcatgggaatagtattcttgctctaaaaacggacctacagttatattttttaattgctttgaaatgctggagttgtgtctatttaatttgtattcattctttcaccaagttttggctcttgggtttgtatggcagataaaactttactcattccttttactgaaaacctctttcccccccagggtatagtcgtgagtcacgagctctctcaccaactgacatttccccatcctgtttttggagggaacaacaaaggacatgcctggtgcctgacacagcgggcccacaggctgctcctttagtggccttgtgagttcgatgagcttttggctctaggaagtgcctgggctgctattactctgtgaatctcatgagagtcacagacctcttaggagcaccagccaggttgtaaagatctcttgaggactgggctctggaaggactggccactccaacaccctgccttgcccttaattgtgcattgcctggtgttctttaattgcctcacaaatgcccttgaaaactctcagggatggcctcactgtgcatgacaaaggaatgcaacctactgtctggttgtactgaaggagcagagagcaggattctcataatgattgttcaaagaatttatttatgtggagtcctaaaaggagtgataggtgtgaaaaaatgcaatttaattcaacaaacattgatgcaaacgctgtgcttggtgacagcaatatagagatgaataagaccagtgtctagtgacgtgctggcaagtacaactggctctgtggggaggcggtaccctgatttgtaccttttgctgatttccattgagtaaatactcttgccatgtttgatttcaagctaccaacatggtgtcaattggctcacagaagccctgaaaatttaataatcagctcttatgagcctgtacaaactgaacttgcattctgctaccaatatctacttttgaagttttcagtttagattggaagatacataaattgccatgcagtctggtaaagacagaaatagaagtatgtagaaggtagaaaggtatcacaagggacactggttcaattctgcggtgggcatatccacatggtaggctgcaaacaaagacaggcaaggcctgtaggtgggtggagacagagaccttcagagcatcctcagtgccttcaggtcatggggaaatgccttggcctgccttaaggtcccgtgcagtctagcctcaccttacctggctgaacattctcccacatttactgacacaaaccttctgctctagtgagtccagcccagtgttttcagtcttgagagcacatccctgccttggctgacacccacctcctcccaccaccgtttagaaagtgccttccctccacctccacttccctgctctactcatccttctttatgaatgcttcctacaacagctccaagccacagaaagcactgacagaaagggaaagattgatcacgtgaattccattaaagtgaagaatttatgtttatcaaaagtcactgttaagaaaggaaaaggcaaacaatggagtcagaggaactgtttggaacacttatgaccaatcgaggatttgtattcaggacatgtaaggacctctcacaaatcaataagaaaaagacaagaaaagggaaaagagaccagaacaggaacttcacaagaatggatatccaaatgacatgaaaagaagcttgccttcactccacctttacctcagtcactagggaaatgtgatgccactacatacccactaaagtggctgaaaccaaatagacttgtattaccaagcattgttgaagacttgaaagagtgggaaataatgtatactgctggtaagaatcagacatggtataacctatttgaaaaacagtttggcaatatttattaaaatggaacatttgcatactctatgacccagcatataatctgaccatactctatgacccagcatatgatatgacctagctataatccaatgaaaatgtatatccatatgtttacctaaaagtatgtactggaatgttgatacagcatcattagttatggctccaaattggaaatacccagacattcatcaatagtaaaaaataaattataggctatttgtgaagtggaatctttttaaactatgaaaaagcatgacatactgctccatagaactacatggatgaacctcacaaacctaattttgagcgaaaggggccaaacaaaaaagaaaacaaatggagttattatatttatataaagttcaaaaacagacaaaactatatgaggttagacatcagtttacctgatacctttggggaagagcaagaggttagtgactgggagggctgtgttgggggcttctgagttgctgaggttgttatatttctggccctgagtggtgataacacaggtatgttcactttgtcattgagctttacgtgtgcaatttgtgtacttttctgtatatcttacatttttattagctaaaaagcaaaggagcttctgcatgaaagtattagaactagtgctggaaagtgagggagtgtttctgaaccgcctttgtgtttttcttttgacgttttctatctttatgagtttattcatcaaacaaagacattttgagagtgacaatgtgccgggaactattttaggtactgagagtgaaacaaaatagaaacaactgctgctttcatggagcttacattctcaaggggacagcaaggtccttgaacagacaaatgtataacaagtcaggggataagaaatactctgaagtggtattaggggataagaggataaagaataatggagctgggctgagggtttgggcactgactaggtgttgttttatatggggtggtcgaagaggacctctgaccaggcagccttggagccagagcctggatgaagtgagtaagggaggctgacaggtatgtgaagaacattccaggcagagagggcagtaagcgcaaaggccctgcattgggatccttggcctccgaagcaggaaactcagcatcattcttggcttctctctctcttcttcaccttcatatttgaatcaaatcatgatccatttgatttcatagctaaatctctcatagtttgcaacctctgcctcccaggctcaagcgcttcttctgcctcagcctctcgagtagctgggattacaggaacatgccagcacacccagctaatttttgtatttttagtagagatggggtttcaccatgttggccagggtggtctcaaactcctggtttgtctccatcccctccattgttgcctatttgggtaatagtttcttaactctgccttcccgtttccatttttttctcttctgattttaagtcactgactggatatgccactcctctgcctaaaagccctccagtggctctgctttgctctcagagtaaatgccctacaaggttttggttttcctcactggtctcatatctttctgctttgccgtacactccgtgcttgagccacaccaaggcgattccatgtttcccacattccctctgaggaaaggccctttagtctctgggtctttctttatgagggtgcatctacctgtggagttctttcccccacctcctcattttatgttttgcacatcccttagatctcagcttagatgttgtttagtctgggaagctgttcctgtcccttaaaccttggccaagtccctgtgttctcctatcgttgccccgtcatatcattttgtcattgatttttcttttttccagcctcccatgaaactctaagacacatgtgggaagtaactatgttacttattcatagtgcttagcaaagtttctgatgtttagaaatttctcaataaatattaaaaaaagaatgcatgttgagctacatttctgtgatatgtcaaaaatctagaagtatttttattagtaactgatagaaatatctttcagtcaaaacattattcatcaactcacaaaaaagcagactagctttgtgtttgagttttgtttttgtttttcctggtaattttgtgttccataatttctcagacacagaaacattatctttcaaattttaataccactttatttgactcaatcacatgtaaaatttttgttcagagaattttgaatgtatccgtgaaaaatattcaaatgtcgaaatccaaatgtcttgctttggctgtggagcaatatcattactgtgacttagttctagaatttagacttaattgctaaaaaaaaaattttgaattcaactttattaattttgtcaagtttttgatgtgctaggtggacattctttccaatttattacagtcccttcatatagacacaaaagcttttaacacgatgggaaagctggtgagacaagtcagaaaataaagcagctcttttttctttttttgttgagacagagactagttctgttgcccaggctagagtacagtggtgcgatcttggctcactgtagcctccacctcccaggttcaagcaattcttgtgtctcaggcaccgaagtagctgggattacaggcagtagccaccacgccggctaatttttgtatttttagtagagatggggtttcaccatgttggccaggctggtctcaaacttctgagctcaagttatccacctgcctcggcctcccaaagtgctgggattacaggcatgagccaccgtccccagccagaaagccgtgatttttaagctgatgctttgtaccatcagtgtgaggagtgatgctattgatccctgctgggcatgagcattagaagaaagttgagcagggacttaaaatggggatgtggagcactgtgccaatgtctttcaaatgggcttttaaaaattattttaacaggattatttggagaatcataaatgtttgagcctcagatacactcatagctaccatttactgagtacttgctatatgccaggcactataaaaactgctttaaatagacaatcttgtttaattgtaataacagtcatatgggattgttaccatcattcccatttaacagatgagaaaattaaggctcagagaggttgagtggtttgccctaggtcatatagcaggtcaaagctaatgctgaactatgaacacagttcctctgactgaaaatgtgcaaggctactaacgactaggtcctactggcttatgtattgaaaagtagatcaatgaactcattctggagctaaatgttgtctattactgtggattatccatgacataacccactcattatattccagtattggttaaaaggtaggagagaagtgatagtaaatttcatgggttcggcatatcttctgaccgacagaagacatggaaatgttttaaatgtttcttttcctttttttttttttttaaaaaaaaaacaaaaacaaataacactaaaagtttcaccaaacaagggttcataaaaggatcgtctctaaattgtgagtgtggtgagtgtgcatgctctgagcaaaaagagcctcccctttctgagggaattgtgaccctggaaaggaggagagcaggaacagctggccatctccccctgaaaggccagggcccccctctcaggcctctgggctccagctctggctgagggtgtgtttgtttggctgtgactctttcccttctgtttccctctcggtgtcatatttcatgagctccaggctcctgcctgtttcagcttgagcctctggctttcatcgctgcctccttggccaaagctgagtgagggcttgaaaaaaacactgattggatgcacatttagtggaggcgattgctggaccagcacctcaccaatccccagccccaaatgcaactgacagctacaccctcctggctggagcctaaaccagaggcccctttcctccctcctctccacccatacccttgctgtttgcccaactcttcctgctgaaatcagaggcagcttgtgcctcccagccttcttccctgcccccgctgtctgcccagccaccagcttcccctgggctggaaagacccccgcttgtctgactgtgctaatcctctgtttgaggttccagaacttcccaattgttgggcctgggttcctgtacttagctgcccagagtccacttctctgctgagatttctattatacaagagattcaaccagaaccctctccgtgggcctccatgcctctttttgctgaattccccattctcattctgcgtagggggtgggagttggtgggggtacatgcaccttgagtctaatcatgatcttactggggagagctcagtaggaaagtaataacatattcatttaaacaactttttctctgttaatctttttattgaacttcatagaattaatggataaagactattggttagagtgcgtctttcttagacgagatggagttagagacacttaaaaaaaaataaggcttgccactgcaggagtgcacagagcacctcaactattggagcccaggtgatctcttcagtgggtcataaaatctgagtcataagaacctcatggcaaagaaaacttgaaactgcaaagtctcacatagtcatttgctgaaaactgaagtgtcccaacaaatgtcgggttagacctactttgagaaacacattccaatatgagatcgaacctgacaattttgcatgctaacctggactgtttcttattagagcaaaggggatgggctttttgtttgctttgggtatatttgtttttgctgccaaagtgttgtaatgtcatgattatttaatatgtatgaggcctagttgtgtactagggagagtcaaaatacatttactacgaaatgagaccagctccagttgtttaaacagctccagttgtaataataagagctaagacttgatgccaagcactgtttctaggtattaacttattgagtcctcatgattactcctcacgatggtcctcttggaaaggatcctatttttctatgagaaaactgaggcttgagtgttaaggaacttgcttaaactcacacagttagtaaaggtcagcttttagatttaaagccaggcaccctcattctagagcttgtggctcaaccactgagctatactgcttgttagggttgttggtggagtgatagtagaagtagatgggctagagtttttcatttctaaccctaaaaatctatagctattaacactgaagacagcaactgccaattaaataaatcctcaacaagactgagaagagaatctgctaatctgttggtcactaatgtctgcagtttatctgcttatctatctgcagcaaaactgtcttagaacactttgctgaatgaaattgaacatggaaagctgactgaagggaaaacagagaaggtgggatagttgagaagggagtaagatcagacaaattgcaatgctctgtgggatactgcgtccaagcagaacagtcaagggattcagttctcagaagctgttcaggtagacgccctccttaccagagtcggttagcctcttgctgtatgcacacttgaggctgctcaaagcgcgagggaggcatggtctgtgctcattccaggcatccaaagcaccagggaggcatgatctgtgttcattccaggtgtcttatctcgctgccacttccaggcctgcacattataggcaatatatttactacactctcccttctcctttattttttacttctggatgtgccatggtgaatatttttcaggcaaatcgggggaatcgtttccatttcaagctgggttgaaatctagcactatgattagggttgtgctaacctctgcctgcctctcccctaactcctgctgtgtataggtgggcatggctcaagcatcctcagggctgggagaaggttgcatcaggaatgtttctaccaacagaagctggccagtgggaggcttgtaggcactttgtaatttaccattctcttcttgaactatgcagcagtctgaggggctgtacagaggattcttcccagtcattcccattgctagctttggaggccttctcccacaattcatagcctcctagtaatgtgctttattcctaaagcccagtccttggggtttttgaagaaaaggaaggcagatcagcatgccttccctagtctgaaattaccctgtttgactcatatagtgtggagctttataatctgtaatccaaaattgggattgtctatactataaggatattctctgggacttacgcttatttaaccaaggttgtctgcaatgggaagctcccatgacgggagattcaggagaaggctggcataggcttctaacttacaccagtgctccctgatgcctgtgaatgtggggagagggcaaggagattttgagaacagataagagacatttgaatttctcaatgccttctgaaaatctgtgtgcagagttgaattgaaacttaccttgttagcattataaatctgaacactttccttgctaggccacaatgacttaataatatcgtctaaaggatctatgttcactctgcttgcactgatttacatctcctttttccaattctgcgtagtctctggacacttctacttccaaatatcacctgtttaaggaatagcacttaccttgtcttgtactgtgaacccaaatttctgtgaaaaatggactgtagcagttgttccagtttgagattgctgagtgtcatgaacattggttttgaagagtatggagtgttgttggaggacagctcgaggctaaatgtggttgtgcaatatggtttctacacactgtccagcaggtggttggatacagttatgccattctctgcttcttgtttgttgtcttcaaaacatgaaaaaataaaagcaaaatatagaatatcttcgatgaattcagcttctcttaatctcacttttatctcctttctgtaagacttagtcattatttccgaatatgccatcaattttatccaagtgaaaattcagttttagttttaaaacacacagatataaaaataagatgcaaagttctacagtaaaattcttagacataaacactgagatttttggattcacaaataaatagtttagataacactcagaaagatcttttcctcctaattagcttctattgtcacctcttcctaagttgatatgtagctcaatttgttaggaaatggatttcccacgcatgccctaactataatcataagcatctgcaactctgttttcaaacaaagcatctgcaactctattttcaaacaaaggtagttactcatgagagagcttctttaaactgcaatggaccacacagaggtggatgtctagcacatttacagtgaccatgatcctatctctcaccatttcttcttttcaatattgcaggattctaaccatatgactttcccacccctcacctgatgtttggcgacaatatcctggcttctactggcaacaccatcttttgctatttgggtaaatgtgctccttatcagccttggatcctacccaggctcagggccttgtgagtgcaatgtctattgggctattgtggaccccatgactatgacccagacactcagttttgtatgccacatcccttttcagggagctaggtcaaggacatcatgcaactcatttgcatgccatattgaagattcacacttgggggaatattttattctcaggcagctaagaccttgaaactccagcatagtatggagagtgctgagccttcagcatttttagcacatgatttcagccttggaaatctgatgtacttgcagacctctacacaagaggaggtatttgcatagaaacatgagcatgctggggctgggtcatccttttactacacatgttaaagcatacattgtaaccaaaattttggaagcaatgagaatctcttactctactattgggatttggggtcacagcaagactttggaagaggtgttactgagaagatgcctctatgaggtgttactcaaagtcattaattacttacagggctctacgagaatggcatagttcatgtcttaaaaccgcttatagctactggttgagacagaaaaggaaactatgtgctgtgtgattaaaccggtgttttcttttttgcattctgtcttctacatgtgttgtggtgaaatgaaactttaccacattcagcagtgctcaggagaaacattgagcagtgttggtatatatttcaatggcattcaaaaccctgataaataatttaggacttggggagatctgggtatgggaagaagaactgaaaaaaaaaaaaaagcagcggtaatttactaatatatgtttgtaggttaaaacactttttatagctgaccgtagtagatagaatcattctttacaactattaagtggtattaaataggttgacccaactcccttggaaaagtgattaattttgtcttccagacctgacttctgaagctcaaagttggtttaaacagttcagctgtagtagaggatagcctgatatcctagttttgccacagtatctgggccagatggcatttgcagtaaatggaaggtaacaatgatcagctctggtatttacgtgtgtaggtgatatggtcatgtgggagtgttcataggcttacaagccatatggctcttggccataaactattgctaggtaaggctttgactctgtatcagtatgaataaagtagctctttcagctcatgagtatccatttgctttgtgtcaggctgatgtcaagttaacctgcttttgcactctggtgaacagacacatagattattaaaactgaaagtgatctaaaaagttatctaaaccaatatcctacatgaagaaggatcctccctacagcctcacaagtaagatgattagtcagcctctacttgaatatttccagtagtggggagctcataacctcacaaagaagcacagcctgtttttggatggctctaatttttagggtgttccctcttatttttgatgaaaatctgcctctctgcaacttccttagtcatgactggagttctgttgtatgagctgaatccttttatttcagaatagggcatcacatatttgaagaccaacattaagtcccagtgtagttttcttttttctgcatgaaacattcgaaggtctttcagtaaatccccttgttttcttggtagggagtcactcatcaccacttttctcttcccactggagctgtattaagctccttgaaactttgcatcctggagatacagctttctagtcacaaagcccaatttaccttctctgagaagagtctagttctttttattagttttagttgtacagtttgggattctcctttttctcctctttgtcttatttttcttcccagcttcctcctcacgtggcgttgttgtgcataaagttctgaatcatatttttcatctttgttcgttgcaattattgtcactctgtcttccttcttggattatttctttcattctccttagaaaatttttgaattctcccatcagctggagaaaagatatcttttaccttctcctccatcttatactgactatgcaagcagcttatacttaggtcccatgcaagcagtgacttcagaaaaaacaagaataccaacaatgtatcatctcctattgttggctcttggttttgaatagatattccctacccaactagattcatgtgtgcgactctgagtataggtcattcatcgaatgtctgttactgctagagtctttgagtatgtagtctgttgatgtgaacctaaatgtaattggtgttacatgcagtttaaatgtcaccctatttcaacctcatgattctcaatctttatgccaatagctacagtatatttattgtctaccataggatctaattacataagctttggtactgctcgttgtccagaaggatcataatgttagagaggacatgtcttcctcacattatgaaggactaagaaacagaggctcagggagaatatttggctcatccaagattacaccattagttcagcagctggtcagatgctgtttccgataagccactcagctagctaactcccttggcttcaatagagaaagtgacttaaactgtggcatttctggtcttttatactctctctctctctctgtgtgtgtgtatatacattttttcttctttatcacctagcatattttctgatatgtaataagttctcaataaatgctggttaatgaatatttcaagccatcctttccttttggaagttgggaacatgtgtaaagggaagaagactagattgagtgataaagcataaaatataactaggaaagtcatagcttgggatagagagtatatgcagtttgttcagaagtatataaggcattgtgctatgtgccacgatgcctatacagnnnnnnnnnnnnnnnnnnnnnnnnnnnnnnnnnnnnnnnnnnnnnnnnnnnnnnnnnnnnnnnnnnnnnnnnnnnnnnnnnnnnnnnnnnnnnnnnnnnnnnnnnnnnnnnnnnnnnnnnnnnnnnnnnnnnnnnnnnnnnnnnnnnnnnnnnnnnnnnnnnnnnnnnnnnnnnnnnnnnnnnnnnnnnnnnnnnnnnnnnnttccctgatatcagtgagtttataatgagataaacgtattatatttggcattgtgaaaatgagataaaaatagagataagactgaatcatatggaaaaaattagtttccagttcaagagaatgttatcaacatcaatgaggagttcagagaagggaaggtaatgaagagcctgctattatgctattgttctcatcagaagaggggtgagtgtgagggaggaagagaggatagatggaagatgagaagagggtgtgtgccagagcactgttgtccatttagtgccagccctgtgtggcaaataggacacaaacctccaattggcttaagttcctgaggtagaagagattaagaatgttaaaaagggaacaaaatttattgagcacctactataggtgaattcatgaatatttcttgatcacctgtctgtggaaggcactgtgttaggtgttagagataaagagagatactatcttcaccttcaagggcaggccaagcagtgtgctaggaacctcacaaaaggaggtgctgaagtcacataagctccccttatgtagttattccagttcctggttttcacgtctaatggatttttccccatagcttctccccctccacccaaccccagcctttccagagtgtgtctgtcttcccaaaatgagtttgatactttgtgcgcatgccgggatccccatgggattgatgacatcatacgccattggctcctattgcacacaagagaggagacagatctgcacattcctgcagttaatgctgagtagaatcttggcagaggtggtggcatccttcatttgactttagaccttcagcctcccttttaaagccctggctcacacagttattgagaagccttatcctgcaaggaacctacagcttaggaaagagttgcccatgtgtctttgctatcaaacaaaagatattggcaaatcttttgtcgattttctattctggcagaggtaccatttattatggggtagatgggatatagataaagcatctccctgcccctaatccctgccttgctgagataaatgcctgttccattccccaatcaccagaaaatgccttggagcaatggagtctaacagcctgagagttgtaaaggggcagcaaagccacttctgcaggaagagagtgtgcatgaaccttattcattgtccatgtgtggagttgcttcatgttcatgctcttcaccctgatttgacacataccaacatcaaataactatctactctaccccatttggatactataataaaaaaaagatagtccagttaccttataaacaacagaaatttatttctcattgtcctggaggctaggacatccaagatcaaggtgctggcagattcagggtctggttagggcccactgcctggtttatggatggcatgttctcactgtgtcctcacatggtagaagcagtgaggcatctctgcggggtctcttttaaaaggaccctgaaagagggtgccaccctcatgacctaatcacttctcaaaggccctacttcctaatactatcacattgagggttagaatttcaatataggaattttgggggaacacacacatccagtctatagcactatctgataaggcttctgaatagtcctgggccattttacataacgggggtttactaaggactctcaacagcatagctcttgcttcaaggggttttccatgcggggcctgccagaatcccctgaagatttgcccttttgcttttgggagaatcattgagagaaaaaggacctggctcctgtgcttttcgcatgctcacccactccggcccttctgattaatgtttgctgttctgctttgcagatgcctcccaggacccagagggagactgtagcctcatttctgtggagacctttggctggactctcctggctctcccagaggtgagagaccgtggttcctgtagcctcaggcttggcaccagctcatctctggtggatccaggattccagatatccaatctcactacagccagggcctctttgtcccagtgtgaccttgcgggctgtccccctgactgcgtcttaacagcccctgccattggtgattttcattccagctacgagccaatggatccctgaaagcgactgtgtgggcttctctcaccatgtcgctctggcctcagcctggcggtgtgctcctctgtggtctggatggggatgatgaactcgggctgcccgttgtttttgttttgtgatatttaaagcagccgaagctctcattactgtaatacagtatgtgcctgggctaaagggggagcagcattccttctggatcagggggcaactctattctgttgtggtgcacccgctggagtgtttagaaccacggctggtagatttacagtgccagggctgacaggggccttggaactcctccattttcattcattccagcctcgttgttggaatgaagagggagctgagcccattctgggtatgggacgattgcttaggccctggggtgatgagtggcagatctgggactagaactcaggcccagaggccagcttactgtcatctggctaagtttctgcttctgttctcttcacttgttcaagatccttctgaggccctgaaccaaatgaggaaaattcatgtaaatcttagcacactgcctgatacataataagtgctccataaacgtttatcagtgctctcataagccctgagacatgcaaaatattcttgcccttcagggacttacagtcttgaggaggagataaaaatttcacacatacacactaacacaattaaggagcaatttaagtcactaaatggttatctgctaagttttggggaataggtgcagtggatcacgcaagagaggagacagattattgtggcctagaagaagtgccatggtgaagataagagcataatgtgtatgacatctgtgtatgacatcttttcaactcctggcagtgagatgaacaggtcagcagccattcctggacactgcagagccctcaggccatccactcatctacccagcacattcactgattatctcccaactctgtgctctgcataagaatgtaaggaagaccatgacaagaccctttcctcaagcctagccagggagacagacatgcataaagatactaccactgaaaaattctacattcatatgtgttcatatcctcaaagcattgtctgagcccacaggtgggtaggcaagtcagataggagcaagagtttgaaggaaagcatacatttacctggtgaaaaggggcaactcacaagccataagctcttgtgcaaaggggctggtaaatgtgagtcttctgcaggagaggtggagttgctgggaggttagacccaagcaagggcattctgagaatgagattgagaagcctctgaggccagcatggggcaagcccttggtgtcacacttggccctggcaatgtggtatttttaacctgggccagaaagtggagaggagcgggcctggtaggatagagaggagggctctttacttatcaagagtaggtaccagatgctggtgactcaaggggaagcttcctgagtggagatggagcctataggtgtttaatcgcctggaacaaacatattttctgcactgcttggttcagaggctgcaagttaaagtaacacagaagagaatgtccggccagcaatgtgaaggaagcatgaaacggaaagggttagaagctgaacttctcttgatcaatgactttattatcttggcaaggattgcagaaactgtaggtgctgagggactgacttgtttggaggaaggggtagggaccaggaaaagaatcccagacacttggtgctaatccaactgctgaatgaggctttcaggctctgggattcaggcaggaactcctgggccatattcttcctaggtatggggctagagagccttcaatcttagtgtctgtatgtccctgggccaatctgctttgttctaccatgcctaacatcagaaaaaaaggggtagattaagtttagagccactgctctgtgtctccatcctgcttctttttcctaaggcaattgagccttacaaggccttctaagtccctatgaggtctacagctgtcagggattggtgaggatggagaacaaaccagtctgttctgaattcaactcttgctttctttctccctctcacaattgaaggtcttcctgagcctttgcctctttcaacagctggatgttgagactgcaatttttcatgattgcttgttttgtattttttcttcatggtctttcctaaagtctgttattcatccaggtccacttatacatcttctaatctattgcaccaaccctgcagccatggcctggcatgaagctgcttgctcattgtcttgttggtttttccaaatgctcacaggcgctagtcatgtaaatctcctcctggcaagaaaaaaagactgactttttgttgttgttgtgttgccccaggtgattcagccagtcctgggctcacaatagatgctaaacatacgattgccacctcgactgctgatctttttcttcctatacaccattctattcataccgctattcaaaaattgatatttataagcacttactatatcccaggaatggtactgtaagttctttatatgcattattccatttaattttaatagtgataccattttctacttttaaccagcttatactttctacactgatagaaaagtgtccctaaacccacagactagttagtacctggctgttttagaagttcctcactcatgacatttctgaagttatcactacaggatatggttgcaaaggcctgggaggagaaatcctttctgtctctgatggtttcagagaaggtgagaggtctctgtctctttgtggtaaaaacaccagggtaggccttgatctcctgagtcttgagtatgttaagggaaagacactaagattgctctgccaaaagggcagacagaccctgcctggtgtctgggaagttgagcccaagtttctctccaaggagggtctcctgcagggatcaggaaggagggtctattggcatcacacatgatctcttctgggttcaggaggggttcctatagctagatgagatagaattgattgatgtctcagtgatgcttcaggccatgttgattgggcctgcactaaaagtaagcagcccttcagagccatgtgctctcaagaggcagcacagccataaccgcaagagtaggatggtcctggtggaaatggcacaatcaaaacaagctcctgggccttgtggctttgagtggctgaactggaaggttcttgaggtatgagcactctcactcacggtattgatcaagcagcgtaatcacatcactgcccccacagaagtggctgccactcagttctcctcagcccaggctgatttctgctctgctggttcataggaaactgcttgggtctttcatgactgctgaagcccaaggcactttccccagaggcagcatcactcacaggatggaccaaatgaaatgtcctggtcaaaggcaggaagtttgtattgttgttcttgcctattttactatcatgtaaatacctgccaaccaacctacacatattctctgagtacttactgagtacttactatataggtgttaatggatacagaaataagagtatggctaggggtggcatgctttttgcccctaacttgcaaatttattgagaacatgatgccaggcacagtgaaaaccaaagagaaatacaaataaatggtaacatttatgagacaggtactaggttctagacacttcttacatgttaactcatttcatccttacaacattcctgtgggcaggtgccattattactcccatttttacaggtgagaagacagaggtgccaaggttcaagtgtgtgcccaggtgcatgacactggtgagaggtgggagacaggactcaaacccagcaagcctggtctcagacaaggtgactcataaggagcagcaagggaggtaggaggcagaacattgagtgcaggggctcagagggtggagggaagtaacttcaatctggtttaaagaaaccagttatcagagacagacagggcctaaagaaggtatgggtggctcagagttttaggaaggaaaaacaggaaattgggctaatagggatagcgtgataagagaacaagtgctaggctggaataccaggggcctggccttgcctgtgagcagctgctgcccctggggaggtcactttgctttttgggctgccttatttttatcacctccaattggagagaattgagaaagatgagctttcaggtcccttcaggtttttaccgtatggttctatgattttgagggctggcatgtttccttggttgcttccaaaagcctctgaccacagtccctcaggctgaccctcttgtgcccagtaatgtggaaagatgaccttctgctcaccagcacatgcttccaagggctgcggagcctgggacagaaggtacggtgggaaagaaaatgagaggagctggttgggaaagatactcacatgcagaaaagtttccagcaagtcagaggtgagagtaaaagatccaaatgaaaagctagagattgctagggctcaccaaggttgaataacttgtccagggtcttagcagactgagggatactggatgataacacttctaaaatactgttttgtatctggaaaatgctctgccttcagtttgcattttctctccttcttcctccccagtaatcaaatgaagacgttagatttgacatttcccagtgtgtacagtacagacaggannnnnnnnnnnnnnnnnnnnagcttgctatttcatccagtgtgggtcacctcaggtcacctggggcacatcctatgtgcccagatacttacggaaggggtcattctgggcctttggctccacaccgaggggctgcattttgagaatcacgaggttgggactcccagaggaaagttgagagttaggaaaacttcaacaaatcctcaggaatagaaacagaacatgagatgagaatgtttgggacagctctgctgtttgtttctgtgtatgtgtttgagggcccatctcttgccaaaaccaagctcatttctgcatatttgtttgcttaatatgaaatactccaaaactgctcttcatatttgtttaatctgaaatgaaaatgactcagcagagaggaaaaacaagatttaaatgccctgaatggcccctgaattaaaatacatagccctaaatcatgggggcgttcttctccccaccaaatcttaatcttcaacacacacaaatgcaagtgccacacacagtcatgcacacacacacacacacacacacacaaacattgtatttgcctgccccaacttgacctcagtccctttatctcttttccccttcatactccagcctttccagggtcctacctttcctgcaggggaggtgcatttgagcttaggtggagaggcctggcctgggctacaggccacagatgattttcctggagggccagcacttcctctccagtccagatcacaggctcagtgtcaagatccctgggggaaatctgaattttcattcttcagcaaagtcgaggccacctcagatagtccctagcttttggatctggaaaaatggactccgtggagagaatggctgtctaccaaatcagacatgtcttgctttttacacaagctgtattcctgaaaagttgggtataaactggatcttggtatgttgcatcaattttgaatgtactgaaaagatttgctattcaaaggaacccagcactggattcttttgtcaagggatgaattactttgtaatggctactcatctagtgatttatgagtttggtaagtagatggaatatttttatatactgaatgttattttaaatgtactgtgtgggatttgttattcaaagttacccggcattgaatccttttgcgaagaactattctgtagtgtagataaacatttcatgatttatgagtttggtaactttaggcatttcttaaagtgggatatacccctagttctgcttcagagaaaaagttgttttttgcaatgatcagacttggagaaaaaagagttctaccatatttgagttatggtcactcctgaggggcttaggaagaatggaggtactcaaactttccattttgttggagcaaaagatccaggagttgcctgctcttcttactttccatattatcactggggtggaaatgatggaggtatttttccaaagaaatgtagttcactattatagctacatttcaaaggtgtttctcttcatatctatatcatttgaatatatatttatatatatatacacacacatacatatatacacacacatgcacatatgtttatacacacacatgcacacatgtacgtatatacatatataatctatcatgtgtatttagatctaaagcaaagacattgcagtagggcttgtgttttgaaccactgaagggctgctgtttccaccagtccagagtgctggggcttgctctgagatcaccaggggtataaaccaggcaagaggagaacttaacttcctgctcactctttctcacttggcaggtcaaaaatcatttcagcacttatctcccaaggttcctagctgtgtccccataccatcctatctgagcactagtgtgaagcttgttttgggaaatgatctgattgctaaggcagttggaaaagagaaatatggtgtcatgtgtgtacaaccaagagctgatctaggatgcccacatattcctggctcatccatgagccacatattcattgaagttcttataggtaggagcaaaccctgcctataagaaccctacatggactggaactgtgtcaggcagaatgttcagataacttaccctttcaccatgatttggccctgaatgtgtctcagaaaaaggcttttagaagctcacccaagtacagagataatttgtgagacatttaacctctcagactcttgcttttttctttcctggagagctgctaatttctagttgtggctgccacactcctgtctgcctgatcttccattttacttcctggtttcctggtggctttgacacatggcctgtccagatcccagtgggggcagtcctgagatggagagctggtggtcttttgtcagatctgggaagtcctgagccatgacttcctttgaaatcaatttggaatgtccatccagcttggctagggaagaggattttgactgtgaagagggaagtgggttctttactacaaaggacatattctctctgagccacatgctccttgatgttctttggtaaatattgggctgtgggcctagaaacactgaccttggagtcaggcgaactgggatccagttcttactctgtggtcttctaacttagtgacccaagcaagtcaaaattaatctcatttcgagatagagatatgcaagatccttgaccttcaatgactcatggtcaggcttgagagaaagtcaggtaaagaagccaactctaattcagcacaatgaatgggaagcaccagccagaccaggtaaaacagcctcaattgagggtgaagtgacttagggccgtacttttctattgtcaaaaggagatgataatttctctccacaggattgtggtgaggctcaatgatgtaatgcatctataagtaactgataaagttcaggaattctaaaatagaaacaggcagtaattctcaactgttttcttcttccactctattcatgtgcaagatgtgctaagacatttcccaatacaacaagtgattcttgaagtataggacgtgttccccccacacctccaactctcggaaatgcacagaaagtgtccttgagattctgatagcctgcttccaggaaaaatgttttgtttggttttgtcagaaaagctaatataaatgacattaacaaggaacacattttccttgttgaaaatcaaaacattacaaataaggctaaagtctccctttgatcaccattcacaatctcctctgacaaatacagcagtccatctcctaactctgtcttggagggaaccactgctgtcagcatggtgtttaatcttccagatcttatatatatataaatgtacatgagtgtgtgtctatcataaaaatatatagtgtgctttacataaactttgcaaccttcttgttcacctaaaaacatgtcatagacttcaaccgttgtaactgtgagtagctctaatgcattcattgttactattgcatagcatttcacagtaggaatattctatagttaataacattatcctacggtagacatttttctaagtttttgttgttaaaaaatatattgcaaagcacttttttgtgcatgcctcattgtgtacacacacaagtctttctttagggtaaataagaataaatgggatatagaaattatggtatatgtatttttattgaaattatcttctaatttatatatccagcagcagagtatgagagtatgcatttgccatattattgccaaagtttatattatcacactttaaaattttgccagtctgataggtaaaattggcattcaactactgctttaatgtttgtctttgtgactacttgagaggttgaatacttttagatgtttacagcattatattgtctcccctgttgaatgctttttatttacttggcccatttttctagtggcttttaaaaaatgatttatagagattattaatactagaagttatttcattatacaatttcaaatatttatcttagccagttgtttacatgttatgtttatgatgtcttttggtcttaaagaagttttgaattttggtggaaatttttattattcttttcatttctggattttgctttccatgtctcatttgtgcaggccttccttatctttagctcatagcaaatttttctagattttccttgaaatattcttatggttccatctttacattttgggctcatttttgtgaggtgtagatataccttcatttgcttttgaaaaggctactaaagcatctgaaacttcttcaccaagtttaaatacccaccttctcatgtagtacatttccatttattcatgagtcttttctgggttgttcattctcctcagtgttctgcttatctatttctataccaattgcatactcagagaggcctttgctggccaccttacctagaacagctctcattccctttctgttacattactctattttattttcttccctgtacatatgtttctttaaaattcttcttcatttacttgttttcttatgtactataagttccatgttggcaggaaccttctttgccttttttactgatgtgcttatcacctgtaatagcacctaatagatatttacaaaatagttgctgaatgaatgaatgaaggccaatggcttgaccaggggtgtttgcattttgagttttatttcttgaggcttaaataaattgtcaaaggggtttgtactactaactaaataagtgggtagagaagggctttcctagcagctccttgacatgcttccatgtatacttttgagttctgttcacatgtcacattgtttaaatattgaacccttggaaagactcattcgaaggtgcagaaaagggtgattctgctcacaataagctttagagatacttccttttagggtatggaatttagaatgaccagatgtagtcactgaatatatggctcaaggcaatcattaattcattctgcaaatacttatcaggcactctggtagtgttgagactacaacaacgaataaaatgaacatggagcttgtgtgtgttgggggggaatacaaattaaacaatcacagcaatgaatatataatgagaaactatgatcatttctatatagaaacattatgtttttagagcatgtaacaatcaaggggatgagagaatattttgctgagaaagtgaccatttagtagagatttgaactaggcaaagagaggagagaaacttcttggcggaggtccttaggcaaaagaaaatggaagaaaaagaaaagaagctccagtgtgactgaggtggagaggatgaggagaagggcagctctggtgaggtaggtggagcccagatcaaaggatgatatagtgtgatgatgagcaaaaacaaaagaaggaacaacaaaaacaacaaaaacccatgtggattttgaagtaacacaagccttaggttcacatatgagtttggtcacctatcaggtgtgtaacctgattagctttaacctctttctccttagcttccttgttgttgaaaacaaacctcattgagttactgtgaatattgtaagagatggtctctgattcgtagtagaagtacatggtataggtataatacttctaggtgctttacagtgctctgtttgttagctgacagtcatctaattttaggcaaaacagaaaaataattattgcttttggagattcgcagcttgaagcccggcaacagtttcaaaaagtaaattagtcaacattttttgaacacttagtaggtttggcttagttcagttaaaaaccatttttgagcacatactttgtgcacgatgtaaagtaatactttggcaatataagaatgaaccattttgaagttaatgattaaatggataattttataacaatgttgtgaaggatccaatagagttaaattaagcatgtgttttggtgaaggaaagaaaggaaatgaggtgtgggagacattctttgcagaaggaattattggggaaggttatggaggggaggaagttacggccagtaacccatgagagaggtgccacaggagagagagagaattctaggactgtcctgcaaaagactgctaggagagggcggtgagccaagtcagtcctgggcctcagcacttactggatggctgcttacaaagagctcgggtctctctggaaggacatcctggattatggtcatgagttagtgctcaactatagccaagaccaatgtctccaggattcacctgtgtgtttctttctctgggcatgtttatttagggacttatttatggaaatagtgttcccgttgctggaagtggctaggaacactgagacatgtattttatcttatccaaatcaattgctatgaaactatgctcatcaccctttgtagttgtagatcacatacccctcagcccctcactatggggccatttaaatcttccgtgttttatttgctttggatccatcctcttcagtcaaaaccatctgactacattgcttttttttttttttaacccctctgggtgtgtcagtattatactgcttagaaattgtcttagaaagcttctgtttcctgaaaaagaaaactccttactcatgtcatcctctgatttactccatccctgttattgcctattaaagtcttgtccatccttcaagaacctgatcagatatttatttctccatgaagccttccttaatcactccagcttaagggaatttcttctctctttataatattgtgtcacatactatttctaatattgcatccaatgcttgcttgattattagtgttactcagagggaattttttaaaaatcactttgtattctagaacagtttttttttttttgtctcactctgtcgcccaggctggagtgcagtggcacaatctcggctcactgcaacctccacctcctgggttcaagtgattctcatgccttagcctcccaagtagctgggattacaggcacccaccaccaagcctcgctaatttttgtatttctaacagagacggggtttcaccatgatggccaggctggtcttgaactcctgacctcaggtgatccacccgcctcggccttccaaagttctgggattacaggcgtgagccactgtgcctggctttctagaacagttttatatttacataatcattgtgaagctagtacagggaatccttgtatatcccacatccagtttcccctattattatcatcttatattaacatagtacatttgtcaaaatgtatgaactgatatagatacattattattagctaaagtccattctttattctgatttcctcagtttcccctaatgtcctttgtctggatataacattacacttagttatcatatctccttaggcaccctgagctgcgatagtttctcagactttcttgtttttaatgaccttgacagttttgaggattactcatcaggaactttatagaatttcccccaactgagacttttctggtgatttttttataagtagactgaggtaataggtttttgggaggaagtccacagaggtaaagtgtcattttcatcacatcatatcaagaacacatactatcaatatgacttatcaatgttgatgttaaccttgattacctgtcttgaggaagtgtttgtcagatttctccactgaaaagtgaccctttttctttctctgtttttacactgtacttcttgggacaaagtaactatgtgcaacttactcttaaggagctggggaagggagatagtaatgcttcattttcttaagagcagattatctacataaattatttggaattcttttgcattggaaatgtgcatattctccccatttgtttattcaatcattaatttatagcagcatgaactcatggatatttattttattctttggtttataattcaatactgctgtttttgaggggaggaactcattaagttggctactgtgtccctttgtcataccccatcatctttttgtgtgtacattttctcaatttctggcactaaaagatactccaagtccatcttgtttatagtctgctccattcccagaatcagccatttttctgaggaatcctgtctccttttattgaagaatgttattagaaatcaagatctgagcactaggtttgctcattgctactgggatgtcattgcctctaggccttttcagcggatggaacatatgtgtgtatactaacccaggcatatacacatatctataaatatttccatatgtaactatttgtatccttattaagctaaacataagttcatactgatgtctccaaatctaatctattatcatagattagatattatgaatcattttggggaaacctgaaaatacagaatcccaggtatcactccaaagataatgaatcgggataaatattgaacttatatgttttgaaaggcaaacattaaaagtaaatgcttctcttggttgaatattggaatcaatatcaagattatgaaaacatcagtttacatgataaatataagttttactttaccattattcaccatttgggtaagtatttatcttaggaaaacttcgtgtgtctgactatacttttgctaatttaaatttcatgagtgtgcaatctgatagagtttgaaaattattatattaggtgattattggatgtgccattcaactcccaaagtctgtgattcgaagtcccatatataaaaacaaacactgcaggaacacaaaattaattgtgagaattgtactcattcatgttggcagtatctgcctcactcatttcctctccttctctttctgttttcttgcattattggttggtggcagactccagttccaacaccatcttctgagatgatcctgattcccagaatgctcttggtgctgttcctgctgctgcctatcttgagttctgcaaaagctcaggttaatccaggtaacatggctattactcagctatatgctagaagaccagcagaatgtttaaacccatcaatgttcaatggtgggtctaaaagctgccaagagggactacaaagctctttctttttaaatctccatggtgaaatatgactaaaataggaagaaaaatgaatatactttatatatatgtattttaatacttacaacctgttgaatattgtaaaatattttcttatatagagtaggggtgcagtaagagggcattttaaaaaatgggaggtggcagaagcaaccatttgcttctgcatcttctgagaaaaacaggacagaatttttagatgtcttggagaacttcttcaggttggtttaccagttgttttgggctgtcttagactttgattttacttggatgtcctgttatgcttttgggatcctggtcctgtgggatctcaggcaggttctctttcctctaggatgtggccatgctaaaaatagataggttaggagaatcttttgagcccaaatttgtgggattattttgtattacatgcatttttaaagtttaaatggaagtaaataattgtattatttattacacaataatgctgcttaacaacctatccaaagctcaatgtctttaaacgagcatttatttggctcctagctggacttgtttggactgttctctgttctgtgttgatttactcaagcataactggaagtcagctggctattggctcatctaggatggatgtggcactgatgaatggggcaactttgctgtgttctgtttcatcctcctgcagactaacctgggtatgttttcctggaaattgcacaggaacaagaccagaagccagaatactcaaacatttttcaagccactgctgaaatcatgtttactaagtctcattggccaaagcaattcatgtggccaagcccagagtcagagtgggagagcacaaaaaattagatggtaaaggtctgggatgcaggtattggagaagaattggagtcattttttttttcattttgctacaaatatgaacatggaaaagtatacagcttaaatgttcaattttatgaattcataaactgaacacatctaaacagtacctggattaagaaacagaactataccagcactttagaagctctcttcatgctcccttccagtaacttttctcaccaccccgcaaaggtagccattatcctgctttctagcaacatagattagttttgcccatttttgtactttatataaatggaattagatgatgcataaatactctttgtgtctggcttctttcactcaacattttgcttatgaaattcatcctactgttgcatgcagttgtcaactattcattttcattgttgtatattactttgtttgaacattttatttagccaatctactgtagatgggaatttgaataatttctagtttgggcccattatgaacaaaactcctataattattcttatataaaacttttggtagagataagtactcagttcctttgagtatacacttagaagtggaacttcatatgtgtagcatatgatatactattctgcataataccaaaaattttttcaagtactttaccattttaccatcccatagcagtatatgcaagttccagttgttccatgctatattttgattcttgagggtgctttaattttgtcctcttcatagcataagggtacatttgtgaaaatgcttgctctcctcccttcataaaagttccatgtgcatgggtttttctttataccttcaataggaaatatgatcaaacatccttaaaatcaaagaattattggctgaaggagcccagtgccttgttactttctcgtaataagctcagctgttgcatctcagatcctaacttgggtaccattttttcctttttctgttctgtattcctctcaatcaattgttgatgtttggttgcctcctactacattcttcatgctctgagttctaaggaagagtgctgtgagtgcatggaatggtgggatgttttggtggtaagcatagtcatggagactggcatgccacgaggacatttaaatgactaaccaggagagctgatcttctgtgttagagtccacactgtggccctggagcaggaaatgggctatttggagacagcaaatagtcatcttaatttttttttctatttctggtgtcaggtatttttgttggctctttctgacagggaaagagaaatagacttcttgctttgcaaagacctttataggaaaacaggacatgttgaaggactaatccttctctctgccatttctttctattttaccaagtcaaaccagagatgagtgtttgaggcagatgagacattttcattcattatcagtgataaagagtctatcatgaatcctgaggctcatagaatgttatagcttgcacactgctgagcataaagtcagcatatgataaatgcatgttgatttaaggatgactcttcaggagtccttactggtgtcaactgaaagactgactataactaaaagtattgaaaggtaactgaaggcactgaaagactgagtgaattcttggccagttaggtttttcccacagaatggccacatgatataacaaatagaacttaagccaggagacctgagttataagcaaatccaatatgcaaccaattattaaattactgaaacattttagttggttattagctataacatattggttggttaatagtaactgagctaagcattaaactcaataaaataaaaataaaataataattagttgaagctcattgttgaagatcttacaatgactattggtcaataagccttcagtattagcatgatttagttgataacaaacattaaacatgatatgatatgaaatatcaatcttggtgtctcagcagataccaagagaggataaataatcttgtttacatttaaaaaaactctctagtatttgaaatcataaatgtctcacaggtgtcatccatggaggctgcagagtagtggtggtatgacagagatagttggctgaagcacgaaggcagcagagtttttggctcactgttctaaagtatctgagttttggcaaagcaggcagtcaggcagatggtgttagtggcatttccagtaatggcagtgttaaaggtagcattgtcaatggggcctggagcgtaggctacgcaagtctttgtgggaaatgctgacatgaaggtgtatatacatagtcctgaattgtgggcagagttctcagctatcttccagctgcaacagtgcaccaggaactggaacctaatcatcattaatccagtgggagaggttattggaagaattagaggcagtttcttatgtcaaaatcatggctcagaaataccatttagctagtgacatccaaatcaaacaaataatcatcccaataatttctgaaaatcatttatacaaatcaacagatgattggaatgttattagttctgatgaatgatttggagttaacttagaaaaaagtatttagcttaacttttgagtaacaaccctaattataatcctgacttggtcataaattaattgtgtgacagtgagggagttgttacgtgtctctttatacttccttaatattttcacttgtagtaagattaagttggattagataatctatgggaccctttctgctacaaaattactgtgatttttatgatgtgagaactttatagcccatactggaagatttgggcttggaagtatagcccctgaagttgcatggctgttttttgcaagaaagactacttgtttccaactccctaccacttcccaggctcagggatgtgaagtctgaatttcaggagaatcttgcctttggggctaagcacacaggaagtgactgataaatacttaaaaattttaaaccctaaaactctgcttagtggcaggtgaatgcagaaaccctgccccagcctaacctgcaggagagtcatagtgctacaagctaccctgctccagagcatcttttgctctagaggtggggccaagaggtagcatttcaggctgaagatatagcgtatgcaatggctgagaggagggtgaggaacatttggggctcctggtggaggataatgagtgagagagccagcggggctatgtaggagatccattcccctgtgggatccttgagtcaagttttcccttatttccagcttgggctgggactgccaaacttgataggagaactaagggcatctccatgggaaagagaccccacaatcatgcacaaaaatacggggctgcagtagttgtttgagtggacatcagtgtcaggctcccctaggggatataaaaccactgtttcagtggttagtggggaactggcaccttacgtttttccaggtaggaggatgaatagaactatcctgatgatcctgaaattctagcccagcagtctgaagccctgggacccacccagccaattagaggattgttgtgtataaaaaacacaggggtgcttgttcttattcccctgacttggcctgtgacaactgtttgtgctcaggaaagggagaaacatctcttcttctcagcaggcaaaccaggcctttaggatccatggtataaagctgaggcagggcagtgctggaacttcccattttcatgtcacactttcccctcataggaagcaggcaacttactaccagttcagagtcctggggtgggagtccccctttggtatccagaatgcttccactttgaaaaagagtggcaaagccattcagggtttgggattaggagaggacgagcttttctcctcctggccccaaatttattttaggttcaccactgtggtttttgttctttccagcatcagtcccacatgtcagtgagttcttagggtcaggcaactagaattctagactgttcatgttggaatggaccttagaaatatctaagtcactcttcctcactttacagatgaggaaactgggagtcaaagcaggtgagtgatttgcccatgctccacatttagctaatagttaagctaggacgaggacccagggctacctgtctcccaatcccaggtgacttctacctgggccctcagggagcaatgtgctgaagtgacctttatctaaaaatcacatatatccatgcagcctcatgctttcctttctgcaaccaacttccaatgtatatttatggggatgagatgtaattgagatttgagggacagcctgaggccaaagaatggagtcagacgaataggatatacagtgctcacacctagtctcatgctaaatgaggaaggctggagctagaagccctgcgggccaacttacccccacccagaaactgaagcaccagggatgctttggttcccttctgcaccaggttgtgcctttatcaccgctcccttgtcttccaccaaggctgctatgtgttaattcacctacacatatttccaaattggaaactcatttttgtttccctggcttctcgtcattcgtgttcccagagatgtgctgagaaggtttatgtggcctcatctgttaacgagaaggtgatgctagtttcaggtttgtgaaaccaggcctgaggtactagtgttgtgatgtgtgtgtatgtgtgtgtgtaggtgggtggcgcgggggtgtagtgtgtgttagatagcctgaacaggccttgagaaaaagataaaaggccggcaaaagacctctctggttgaatttatcttaagtgagcaatgctagaagctgcccagattggctctttcttgcttgtgtgtttgttttttaagtctaggctgacgcctgagagtggcctttggcatccttcctgccagtaaaagagcctttctctgggtaaaacagaaactcatctgccccttgagccctcttggttgtgccaaatagggaaaaagagaatgcaaaactcaaagaatattcaatgaacacttaatatattctgggtaccattttaagtggtgtcaacaaatttaatcttcacaataatcttattagtattagtattattatataatagtagtattattattccagttttacagaggagaaagtgaggccaagaaacattaggtaactcatagcaggttacagagaaagctaagtggcagaaccggcattcgactctgctccagcaagcatgctcttttcttctacttcttttttctttatcccgtttttcaaatttccaacaatgtatcagttaagagtttttcgcttgtttttttgtttgtttttggagagggcatgttgctctgtcacccaggctggagtgcagtggcatgaacatgactcactgcagcctcaacctcctgggctcaagccatcctcctgcctcagctccccaagtagctgggactacaggcatgcgccaccacacccaactagtttgggtactttttgtagagaaggggttttgccatgttggccagactggtcttgaactcctgacctcgccctcctaaagtgctgggattacaggcatgagccaccacacccggccacaagcatgctcttgacctctgtgctctactgcctttggagtgtgagactcaaggaatgtcagggcagaggaaacccagattcatggaccagccacgaatgggctacagagacccgtgaatcccctgaaattgcatcccaaacttaatgtgtgaagacaaaagtacatttgcaaaatgaaaaatgttttctattatcagatgctcaaaagactctgtgaccagttctagaaaagactaagaatggtggatttaatctaatcttgtacaaatgaggaaactgaggtttagggagataaagtgatgggaggaaacatgtttgaaaagactattagcagacctaaccaggctttgcctactcgctggacgagcatggtcagagttttgggttctctgaactgcagtcttctcacctatcactgatcgctgccttaagggctgttaggaagagtaagagaatatatgtaaagtacctagcatagtgtcaaacacacagaatgtgattaataaatgctggaacttctgtcctcttcctcaattttgtatattgtgctgtgataatggcagacttcattagtctttccattattctatactgtcctttatattttagtttaatcatttcattaattaattatttaacttaattactatactgtaaaaatatttcattttctttgagggcagacttcacctaattcctgggctttgtatcttgggataaaagggttccaaatacatctactgcatcatcacctttccatccaaagtagccaggtgaattcccggttcataccctgaaactttgccttcaccctgttgttttgcattctgaggcctagattcctagttgtaaaaggcagtcagaggagctaaaagtaatgcaagaaaaaacaaagctccactttttttctgttgtcagtagggatagaggcccagggagacctagtctccttgagtctaaactttggggccaggagcatgatcatgggactccaggaagagcttcacacaaagtcccttttctggacctctcagttttcacaaccacctgcagagctcagttttgctcagggctctcgtgtggaaagactaagagtctacagaagaacaacagtgttggcaggagcagacaaggagacagggaccctgcttaccatggaaactgggcgcactggggccattaggtccgtgcatcactgctgcttcacatatttgcttattaatgttttgttctgaaagctgacaagaactctaggggcttcaagcccataagatcaagacatacaatatagcgatataagtatgtaagaaacatagattgatacagatataaaataggaaaaggatatgaaacaaatataatatatatgataaaaattataaatattataataaatatattataaatattataatatttaatattattaatacattaaaatataaacatatatttatattttgtaaatataaacatatatttatattttgtaaatataaacatatatttatattttgtaaatataaacatatatttatattttgtaaatataaacatatatttatattttgtaaatataaacatatatttatattttgtaaatataaacatatatttatattttgtaaatataaacatatatttatattttgtaaatataaacatatatttatattttgtaaatataaacatatatttatattttgtaaatataaacatatatttatattttgtaaatataaacatatatttatattttgtaaatataaacatatatttatattttgtaaatataaacatatatttatattttgtaaatataaacataaatataaatatatatataaaatatgtataaaaataaacataataaatattataataaatatacacacatatatatgtgagtatatttatgtatgtatttatatatagatatatctatatttatgtgtgtatatttatgtaagtatatttatgtatgtatttatgtatatatagatatatctatatgttcacatgttacatgttatatagatatatctatctatatatagagttaaaaataaataaataaataaataaaaataaaaataaaaataaaaataaataaataaatacagagaagcctgggagtttccttgacttcctttttccccctccctcttcttattcatcaaacatttgttgattgcctatataagccaagcactgtaataggtgctggtcatgacgacacaacagattatcactacaccagagacaaagaccaaagtcataaaaacctctgaagcaggaagaaaaaaaaagttgcataaatttttttaacaactcatcacctcccacttaggctcataaaaaaacctcactgattttagtgtcttaacttctactttactgtgtatgtgtccaaactactgaaaaattctgtgagggctatcttgccacatccatactcttcagagacccacaggccaggaccaagagctaagtcgacaatcacactatatatatctatatatatatatatatagatataatcacactatatatatctatatatatatagatataatcacactatatatatctatatatatctatatatagatataatcacactatatatatctatatatagatataatcacactatatatatctatatatagatataatcacactatatatatctatatatagatatatctatataaatatatagatagatatctctttatatatatatagatagatatatctttatatatatatagatagatatatctttatatatatacatacatagtccataaatatgtacataaatatgttcacattttacccaatcaggtcaaatctccaatgtcatgctagttgagatactgaaggtatgagagttagctggagctgaaagaatttgccaggccaggtaaaaagaggaagggaaagcttttgagctgaagaaaaggcacagaggcacaaatagaaaaacaagagtgaggatagtgattattgaggggtcatgaaggcaaaggtggggttaggatggcaccaaaagtaggaaccatataatcttgggatcctcagtatatgacaaatgttttatgatcaaaggccttgtcttcacctggtgttaacataatgctatgccatgctgtctttcccagagtgcaggttccttttgctatcacatttcaacaaatcctgggacaagcacattctaaaaattagacaagcaataatcctccctgggctctctgtccagattcttccccaacttggtgattcttgaccctagtgatcacatgataaacagggtgtgtgtgctggtagcagggtgtgatgaccacgtgatacggttactagacagactgtgacaatggagatcaagagatctagattctagttccagctctgtcactatctagctttgtgactttaggtaaatctctgcacctcactttgctcatttataacatggggtccataaactttgctctctgaacttcatagggttactgcaggggattgaaagagataatggaaataaatgggctttggaaaattacatgcaaatatcaaagactgtgatttgttacttttggaagaaaagaaaatgaaaataaacactatgaaacaacagtttctatcaagcagatgatgcaggaggaagaaagagaaaaaaactccattagtgatcattaaggtcccttgtggtccccaagaccgactcaagttgcttttggggaatggggcttctaacagtcctgaactctggccaccctaactttaaagggatgcagggaccctgtgctcaagccaagcatatccattttatataaaaaaaaaatttttttttttttttttttttttttccttgggagaatagtgtgattgttgacttagctcttggtcctggcctgtgggtctctgaagagtatggatgtggcaagataaccctcacagaatttttcagtggtttggacacatacacagtaaagtagaagttaagacactaaaatcagtgaggtttttttatgagcctaagtgggaggtgatgagttgttaaaaaaatttatgcaactttttttttcttcctgcttcagaggtttttatgactttggtctttgtctctggtgtagtgataatctgttgtgtcgtcatgaccagcacctattacagtgcttggcttatataggcaatcaacaaatgtttgatgaataagaagagggagggggaaaaaggaagtcaaggaaactcccaggcttttctgtatttatttatttatttttatttatatttatttatttatttttaaatggagtttcactcttattacccaggctggagtgcaatggcgcaatctcggctcactgcaacctccgcctcccaggttctagagattttcctgcctcagcctctcgagtagctgggattacaggcatgcaccaccacgcctggctaattttgtatttttagtagggacgaggtttctccatgttggtcaggctggtctcgaactcccgacctcaggtgatccacccaccttggcctcccaaagtgctgggattacggcgtaagccaccatgcctggcttttttttttttttttgcaaaaaaaaaaaaaaaaatctaaatgatgccatgtgagacttgatctcagaaagatgttgggaagctgggaaggaacccataggaatatcatccctttaaatgatgagatgctgagtatggtgtgagtaaattagaaggaagataatgaaccgaggccatttcagctgaagctaccaaagtgcagcaccaggtccagccttctagtgttagagaactgggagagcccatctccttgcagaggtagagcagcccgggactgcaggggagggtgaggccttcatgcttgttcctaaatgcctaaggtcttcgtttaggctacaagcggagcattttgattgttatacataaaggaaaatgtggttaaatttaattcaaatatatgtaaatatcttatgattggcatttcaagggaggaagtcagattcaatcttttggctactgtaacctatattaaagataggaagtatgcaatgatgtgtactgtctatgtacaggtattgctaacttgagaaatgtattggcatgggaggagccctgggcttgcccataggacaaatccacctcgaaagcagagcagagtgtcttcattctgggtagctggtaggatgtaagcctgaattcttggtcttccagtgcttcttaaaaactcccacgtgctctctttcctcaccaggtcctgaactctaatctgtgtcctgtccgactctcaaaaaatcagctcagctcttcagagggcttctccttacattccccctccacacagccccagcatttggcacatgtgctgagtgagatacactgcatgctcgagggataccaggtctccctcaaaaactctgctaattttgtcccgtagagaccgtctgctagtgccaaacccggagtcggcctcctgcccctgctccaaatgggcaaatggctgaaagtggctacagaagttccctcacctctctgagattctcccttctctgaagtcttggtctctgcattctcattgcctcagaaacaatcagattccttcaagtagatgatttatgaattttatttagctcttccagttacttttagagggagcactaattactgcacactactccatcccacctagaaacagagatattaataaaaagtgaatttatactttattgccactgtgattcatgttaactaatcatgttttactttttgacttgacttctaggaagctcagagccaaagttgaaacccatcatcagccagtggtatagaaccaaatgtaatactctttctgtattaaccttagctctagcttatctaattgttcctattttctttttcctttatccaaatttcttcacttatttatttatttatttttatcttatgcaactttggaagccgactccaaactttactgagtgagtcaaagtaaaaataattaaaaataaataatacctaactttattgaatattagtgctctaagtgcttgacataattaactcatatattccttatggcattcctataaacaagtgcaattactaccatgaaattgagaggctgaaagcttaagtaacctttctaaggtcataaaaccttttaattgtttaaggaagagtgaatgtactattttaaacaaatagttctctcttctcctcttagatatcatttattgagccccattacattctataaagtatgctaacttctttgtatacattatgttaaccttggcttggcaggattatgaaagatgaagaaaccgaagttcatagaggtttggtaactggtagtggggtcccataattcagaagtggcagagccaagtcttaatataaactttccatgattccaaaccgtggcctcagttttcttcttcactcctgatctgcatagctacccagtttcctcttcagcttaccttcttgttggggaaaggagatactatttactatgaaagtttcactgtctttgttaaccaggaagaagaattcattatctgatccctatgttagtatcctgaaacccactacagcttggggactgctctcctggggctctgcaagaattgtttctggaaagtattttgggcttccaggaaaactgcaatcctaaaggtctattcctaaggggaatttcaacttgtgcaagaggtctgggtgaccattatacccaaagaatagccctgtaggctgaagaaagaaacccaaataatctttcttggcccccctgtggaatcccattgtgtcaatatttatctgcacaaaggaccagtctgaaacagcctgctctgtgaagcttgtgggaagcagggcctcagtgacagtttctttaagtggactaccttgtcctttcagaaactggaagaactagaccatggtagcctagggttggaggaggaagaaccagggatcaggagacctgaatttcagtcctggttaccctagccctctgtgtgaacttgagtaagtcacttcacctttctgggcctcagaggttctgatatttaacacggagacattagagggattggcttcttaaatttgcttctgggctccaacgttttatgattgcagatgtccctttagattgtagactggcttgagaccgctgaccccaataatgcccctcagtcagtcttgtctgggcccagagaggcccaggtgtcaggtctctgcacctcaggcctcatgtgggccatgtgtgtgttttcctggaagctgcatataggacactcattgacggggagcccgtggtctggagctagtagtgagatggtaaacattatggaacaagcagccctttcaggctctcagccttggcaggatagtatgaaaaataattcttgggaagctggggactggtggcagctgcttctcctcagcctgcctgccaggccctaccagagcttggagggctggagctccctgctgggcctgccacagcctgtgctggtagttttccactctgggaaactggaaaagtgaattggcttctctgtccgggagattggtgggtagcggaagcatcagaaaaccgctaagacaactcagcaggaaaaaccaggagacacttctttgctgcagggtctcttgcttcccttgccattcccagctttttcatgcttctttacagttcatgatagaacaaagacagactggtgggatttgatgaacgaggaagtggaactgggggaaagcaaggagacctgacatttagggcttgggccaacttggcagttctgagtcttgactattggctgagatcccttccacagaaggagtttacccaaaataggcacattcaatgggaaaaccacactggtacagctgagaagtgccacgttggttgccctgggcttttcctggttccaaagattcagtaggatgagaaaggtcatccaagatcatcttgtccattttcctgtgccttttctctaaggcccttgggcatactgagtcactgagaaactttgcctattttcttaatgtgactattgctgatttactaagttcttatctctgaattgtctatcctcatccttatattactttgtcacaatttctagacctccatcctaactttcgttgtctggagattgtgtgcaatacttgtagccctctctgccttttcatctacttatttatttgccaaacgtgtgttaagcatctcatgggtgctgtgtgttggcaggtactgagggggaaaaggaagaatctgacatgattactattctcaaagttgctcacaatttcaacaaggaggtaaccaagcacaagagtaacagaaaatctccgttggagtttgttacttaatagagctcgcctacacaccatcatcactttaatcccatgccacgttttagtattttccatagcttcgtcacattatctgaatagaaagagccagtaatagctactgtcaaatacataatcaaattgtgcctatttgattatgaaaaatctattttcttttttctgtctcccctaccggaatgtaagatccatgagacaaattattttatctgtcttgcttactactgtatcttcagaagaacacccgatacacagcaaaaacttatttattaaataaatacatacacatttgtaaaagaaatacatttgtgaactcaatacatgcaggtaaagataggttgcaataaaatatgtcatgactcagacttacaaggaagtttcctgtatctcctgtctgctaaaacaccattagccaaggctacccttgaccaaactcccaggactttgtttttaagccttgtaaagtgatgaacaacagaaaacacttcctttatcacttttcaatagacgtttattgagcacttggttaatgccagacatcctactagaaattggagatacaacagaggaagatagatatgatccttgccctcataacacatgctgtttagtgggcagaccaaaattaaacaattatttacattacaagtctaaaaactgttatgaacgaaaaccagtttgttataagagcatataatagaaattcctaacttagctggggacttgggggaattccttgggggagtgactggctgacagctgaaggatgagcaggagctagtgagtgaaggagggaggatgcacatcccaggtaaagggagcatcatgcacagagaccttgaggctggaagatactttgtgcattcaggaactgaaataaggtcagcgtgcttggtagagagcaaagaacagggaatagccagagatgaggccagagagtaggctgagacccaatcgtgtggacctcaagggtcacattttcttaagaagaatgaaaacctgttagaaggttcatgacagaataaagttttaggaagctaatttgggctattgtgtggagaagggatgatagaggaacaacgaagaagagctagaaggcattatagtggctcagatgggaggtcatggaggttgcgcactgcatgggaagaatagaggagagaaacagctggactcaactgcaggaggtaggatttgtagaacttgctaatggactggatggttctcaaaggccaagcttacttctcattccttgactgccgcctgttgagagtaacatcttacctatcattcctggactcttcctctccaagaattctattttggtctccaggcagaggttgactcagggagagcctttccagttttcatcaatgtcattgccactctgctgtccaccacacagttgacctaaaccctctgtatgctggaagagctggacgagtcgaggaagaggggagcgctgacatgtgtaacaagttatttacatgaaatgaagcctcatgtcctcccctacttcctctagttctcaagcttgagtctgcattagggtcatctagagtagtggttaatacactgtttgctaccccctcccagcaaccccaccagagtttctgattcattaggtcaaatggagactgataattagcgttgctaatgagtttccaggtgatgctgatgctgctggtcctggaagcatattttgaggatcacagctctaaatggtaactgaaatgcaatcacaatacatagatcaaagagctttcaggaaggaaactggcactcctttgacaccacatagcagagtatcctatatggatctacctccacatctgttatataggaaaattcctgaatgggttcagttaggacacaaaatataaagggtttctatgcctaggaaatataatttaactgaaatgtgtcataaaagcagctgcagcagcagtagctctgataaaactccttagttgccattctcagaatgagcagtacgttagaaggaaagttatttgcaacaatatcatgattcacctcatgtgacccacattccctatttctgctttactttagatattccaagaagcagaggctctcattgcattcatggcctagtgtttagagatgcattaaagccagggatgaaagcccagtgggacggtcagtgtggctttctctggtgcccagcatggtcctagagaatcattacacgtccaggctgaagggacctgggagcagtggctccagagcctggctacacagcacagtcacctggtggactgtaaaaatatgcaggttactgggctcagcttcaggtataccaaagcaaaatctctaacaggaggctcacaaacatgtattctaaaacctctccaggcttttctaatgctattggtccatggactggctttgggaatcactgccttacagaaagcctaatagaactctcttgctttccacatgaagaaacagaccgaaagagagccaggagcttgctcagatcccacatggtataagtggtagaaccgggagtggatgcgaagtcttgattttcaagggttgtgtgctcagtggaattacaggctttagagccaagttctaagatgagttagtatttactcaaggaatggcctttgcagttaaaacttacctgtagaatgtgtgattagtgggaaacatgaaatattgggtggaaaatgcttatcatattgcctgacacttggtaaatgcttctaaatggatgtcatcattactgcattttactgaatttaagcaactcacgactctaagatgcatcattactttatgtgcctctaagaaagaaagaaaaactactgccagttaaactatgacactatttgcttgcgaagtgcatccagatttcagagatgtcagtacgtgaaagaatgggcagtgtggtatttcacttctcttttctcaactctatgaagattcttactttactgaattagacacttaacagtacatgaaaattcctgaaggagaagtatacttagtgtgtttgaggaacaacaaggaggccagtgtggctgatggggaaagtggggtaaggacaaggtccaagacagccaggggatgtctgattccatgtcttcactattgtgaatagtgtgaacagaagagtttcatgatatgactttcatttcttttatgactacatagtattccatgctgtatatgtaccacattttcttttcttttctcctttgctttttctttctttcttttttttcgtttctttttttttattacagttttattttttatttattttttttggaataattttttttttattatactttaagttttagggtacatgtgcacattgtgcaggttagttacatatgtatacatgtgccatgctggtgcgctgcacccactaacgtgtcatctagcattaggtatctctcccaatgctatccctcccccctcccccgaccccaccacagtccccagagtgtgatattccccttcctgtgtccatgtgatctcattgttcaattcccacctatgagtgagaatatgcggtgtttggttttttgttcttgcaatagtttactgagaatgatgttttccaatttcatccatgtccctacaaaggacatgaactcatcattttttatggctgcatagtattccatggtgtatatgtgccacattttcttaatccagtctaacattgttggacatttgggttggttccaagtctttgctattgtgaataatgccgcaataaacatacgtgtgcatgtgtctttatagcagcatgatttatagtcatttgggtatatacccagtaatgggatggctgggtcaaatggtatttctagttctagatccctgaggaatcgccacactgacttccacaatggttgaactagtttacagtcccaccaacagtgtaaaagtgttcctatttctccacatcctctccagcacctgttgtttcctgactttttaatgattgccattctaactggtgtgagatgatatctcatagtggttttgatttgcatttctctgatggccagtgataatgagcattttttcatgtgttttttggctgcataaatgtcttcttttgagaagtgtccgttcatgacaaacccacagccaatatcatactgaatgggcaaaaactggaagcattccctttgaaaactggcacaagacagggatgccctctctcaccgctcctattcaacattgtgttggaagttctggccagggcaatcaggcaggagaaggaaataaagggtattcaattaggaaaagaggaagtcaaattgtccctgtttgcagacgacatgattgtttatctagaaaaccccattgtctcagcccaaaatctccttaagctgataagcaacttcagcaaagtctcaggatacaaaatcaatgtacaaaaatcacaagcattcttatacaccaacaacagacaaacagagagccaaatcatgagtgaactcccattcacaattgcttcaaagagaataaaatacctaggaatccaacttacaagggatgtgaaggacctcttcaaggagaactacaaaccactgctcaaggaaataaaagaggacacaaacaaatggaagaacattccatgctcatgggtaggaagaatcaatatcgtgaaaatggccatactgcccaaggtaatttacagattcaatgccatccccatcaagctaccaatgactttcttcacagaattggaaaaaactactttaaagttcatatggaaccaaaaaagagcccacattgccaagtcaatcctaagtcaaaagaacaaagctggaggcatcacactacctgacttcaaactatactacaaggctacagtaaccaaaacagcatggtactggtaccaaaacagagatatagatcaatggaacagaacagagccctcagaaataatgccgcatatctacaactatctgatctttgacaaacctgagaaaaacaagcaatggggaaaggattccctatttaataaatggtgctgggaaaactggctagccatatgtagaaagctgaaactggatcccttccttacaccttatacaaaaatcaattcaagatggattaaagatttaaacgttagacctaaaaccataaaaaccctagaagaaaacctaggcattaccattcaggacataggcgtgggcaagggcttcatgtccaaaacaccaaaagcaatggcaacaaaagccaaaattgacaaatgggatctaattaaactaaagagcttctgcacagcaaaagaaactaccatcagagtgaacaggcaacctacaacatgggagaaaattttcgcaacctactcatctgacaaagggctaatatccagaatctacaatgaactcaaacaaatttacaagaaaaaaacaaacaaccccatcaaaaagtgggcaaaggacatgaacagacacttctcgtttctttttttttgagatggagtctctctctgtcgcccaggctggagtgcagtggtgtgatcactgcacctccgcctcccagattcaagcaattttcctgcttcagcctcctgagtaactgggattacatgggcacaccaccatgcctggctaatttttgtatttttgatggagacagggttttaccatgttggccagtctggtctcaaactcctgacctcaagtgatccgcccacctgggctgcccaaagtgctgggattacaggcgtgagccaccatgcctggcccacattttctttatcgaatccactattgatgggcacctaggctgatttaatgtctttgctattgtgaatagtgtgagcggaagaatttcatgatttgatttacattctaaaagatacatgggaaaaggtggacaaagggagatcagttaggaaattattgcactattcctggcaatggaagacagtgaattagcttattatgatagtaaaatatgtgagaagaagtaggtgggatatgggaatatttttagggtagccagtagaatcttctctcagtggatggactgaatacagggtattgaaggagtcaagaatggcctcaagatttttggcttgagtcgttgaaagaatggaacctgaaaaaaaaaaaaaagactgaaggatgagctttggagggagtctgtattttactcaatgttatctttattccttatttacatctatctctaaagtttacctctttttttaaataaatatttttaaatacctattttctccccaatatgcactgagaaataaaaatgaataagatacagtggctttattcccctcaaaattttgccacctgcaggggagataggactcacacgtggtacattacaaagcagtatgtatctaatagtataagaaagatatttaaaatgtgagaaatcagagaaaggaggcattcattgtaattggccctatcctcccctcaaaatgcttgcttttgttgagtacaagttcattacattggaaaaggagaatgctagcataataactttaactagttttttcactttgggtaaactgcctccttgctgtacctcaaaccacctccacaacaagcatgctttttcctcaagtttacctttgcatttgctgttccccttgcataaaccatcatccctgcaagagtcacctggttgctgtcttccttcactcaggtctctgctccgagtcaccttatctaagaagcctaccttgatttctttatataaaagaatgcctattccttttgcatactttttcttcacagcacttgccatcttctctcacattatatatttatttgctttattggctgtttccccacatgagaatgtaaactcagtgacaaaaggcactttgttttgtttaccactgtattcccgcaaggccaatgaattgcttaacgaattatttaataaatataggaattaaaataaaccatgggtttggaaagcaataagcaaatggggttggagataggactggactctgaacacagcgttggtttcagaagagagagaagacactagagaacagctctctgactaagctacatgcctctgtggcagcctggaatcttgggacacacggcttgcaccaggccactcttttggttaaagcaaaggttaaagtctggtgtattgggacaaactttggatagagatacagaatgtgatctacgtcaatccctactacttaatagctgtgggccttctgccagtttcctcatacaggatgagtatcccttatctaaaatgcttgggaccagaagtgtttcagatttcagaattcttggactttggaatataatataatataatataatataacataacataatacaatacaatacaatataatataatataatataatataatataatatagtataatgtaatgtaatgtaatataatataatataatataatataatataatataatataatataatataatataaatttacccaggtgagcatcccaaatccacaaatccaaaatccgaaatgctctaatgagcatttcctttgaacgtcatgctggtgttcaaaaagcatcagattttggattttagatttttggatttgagatactcaacctgtatatattttgagagtaatagtgtgtactctgccaactacatagggttattgcaagggtaaagcaaagataagccatgggacagcactttgcaaactgttaagaattctattatcagggtcaagatggcaatcagggacactatgacatggactacagtcaaaagatccaggaatgcctgccttggacagctagatcttctccccaggaggtgcctgagggagacatacacacaggtgacagtcacaaagggtaagtgaagttctacattattagtagctgggcttgggtcctaaatgccaatgtgagcgttctgataaactgacctgggcatgtagcccaggttaaaggcctccagaagcctctctttattcattaagtcactggtgacaaggactaaaacacttagcacactcagcgacatgtaagatcagtgttgaggagggattagagcaggcccctgagagggccattttctttgtgtgattttcaaaaagtacattgatctcatccattggaaattttggccccattagcatcctgtgttagtgtttcctcatccttactcttcccttcaatttcacttctcagaaagtggaatttgagaatttgttgcttcatccccaaacagttcagatttgcccttaagattcaagcataatgattacctgtggcacacattacctctactggagaaattatacttttgataagaataggcaaagtgatattacattcatatgttcatctcttgattcaaaactgacttggaaatcatagtggatggtgtgttaggctgttcttgcattgttataaatacatacccaagactggtcaatttataagaaaagaggcttaattagctcataattctgcaggctgcacaagcatggcattggaatctgtttggcttctgaggaggcctcagggagcttataatcatcgtggacggtgaagtgggagcaggcatgtcacatggcgaaagcaggagccagacagagagagtggggtggcggggaagggactgcacactcttaaatgaccagatcccctgtgaacttagagcgagagctcacttatcaccaagggcatggcccaagccattcatgagagatcttcccccatgatccaaacaccctacctcctctcccacacaccagcccccacctccagcattggggattacttttcagtatgagatttgggtgggcacaaatatccaaactatatctgatggtgtattaatccattttcatgctgctgataaagacatacccaagactgggaagaaaaaggggtttaattggatttacagttccacatagccggggaggcctcagaatcatggcacgaggcgaaaggcacttcttacatggcagcagcaagagaaaatgaagaagaagcaaaagcagaaacccctgataaacccatcagatctcgtgagacttattcactattacaaggatagcacgggaaagacgggcaggcccccataattcagttacctccccctaggtccctcccacaacatgtgggaactctgggagatacaattcaagttgagacttggtggggacacagccaaaccatatcagatggtgaacatagaagtgttcctgtgggtatatggccatgtttcttgccaaaacttcctgcatatgattctggttaattgcagtttctggaagtatcagctaatccttggcctaaagctatctttcccttttttagggtgagataagactccaggagttctccttggtatgatacaagcagaagggccctcttgccttcagttcttcatggttgtagtggatatcctcattcttcaagcccatgatgttccttagggaaggtagttctgctgtttctgtgccaagcctgggcattatgctcacgtgaaacctttttcccttgatttttgctacttctccagggcacttcctgggaatggggcttggtacctattaggactataaatttgcctctctctgacccctccaagctgagagaagtctcgcctttctccctgccacctctactccaccctgcagtccctttctgagggcaggctttctaggaagttctttgtcttcatgtagtttcttttttcttccctgtaaacataaatgtcccctagggtgaatgaacataaaggcctggccacaggctttgaaaaaggaagtgataatacacaaaaatcttcaaaattatctttctccagagattatttcaaaaacagttttattgaagtacaatagacatacaatagactgcacacattaaaaatgcacaagttggccagttttgacttacatataaacctgtgaaatcatcaccataatcaagataatgaccacatccatcactaccaaaagttgcttgtgtccctttatgattcctctggccgctcctccttcccccaggaaacaactgatctctttctgtcactatagattaacttgtttttgttttctaaagttacatataaatggaagcatacagtatgtgcttttttggtctgactttttttattaagcataattgttttgaaatttatccatgttgttgtagcatgcatcaatagttcattttattgctgaatagcaaggcatgatctagggtaggacaagtgaagtgcctagggttaaaatgcagtcagttccttatgatgataatcataatgatgatgactgtaaaaacatttaatgagacctgctctctgaacaagtttttaagtgtaatataccgtatcgttaagtataggcacaatgttgtacagtggatctctagaacgtattaatcttgtataaccgaactttatatccctcgaatatgaattcctcatttccctttcctcccaattcctggcaaccatcattctactttgtttctatgatttaggccatttttgatatgtaacgtatgtggaatcaggcaatatttacccttctatggctgggttatttcacttagaattatttctaccgggttcaaccatttagtcaaaaatgttaggatttctttctttcttcttttttgttcttttcattattattttttattatcattatactttaagttctggggtacatgtgcataatgtgcaggtttgttacataggtatacacgtgccatggtggtttgctgcacccatcaaaccatcatctacattaggtatttctcctaatgctgtccctcccctagccccccacccaatttctttcttttttaaagctgaataagattccattgtaggtgtatcccacattttctgtatctacttatctgctgatagtcatttgtgttgtttccatgtcttggcttttgtgaatggtgctgcaatgaacatggaagggcagatatctcttcaagatgctgatttagatcctcttgggtatataccagaagtgggactgctggagcatatggtagtcctatttttaattttttgaggagcctccatactgactgcatcattttacattcccactaacagtttataagggttccagtttctctacatccttgccaacatttgttatcttttgattttgttgatgatagtcatcctgacatgtataaggtgatatctcattatggttttaatttgcatttccctaatgattagtgatgttgaacaccttttcgtgtaacttggccatttgtatgtcttctttgaagaaatgtctattcaacttctttgaccactttaaaatcatattttttgtttcctatcaagttgtatgagttccctatatatcttggatattaaccttcaaatatataatttgcaaatattttctctcattccaaaggtcttttcactttgttcattgtttcctttgctgtgcggaagtttttgttgttgttgttcaattgtagttccgcctgtttttgcttttgttgcttatgtgtttggtatcatatccaagaaatcattgcttagaccaatgtttttttcatgtatcttcttccaggagttttatacttttagatatcatgtttaaatctttaatccattttgagttgatttttgggtacaatgtatgataatagtttaattttattatcttgcatgtggatatccagttttcccaacaccatttattaatgagatttttttttttgcccattgtttatttttgacactcttgttgaagatcagttgacctgtgtgggtgacttccaggctctctattctgtcctattggtctatatgtctgttttttcaggtaccatactgttttaagtaactttctaaaatattttgaaattaggacgtgtgatacttctgactgatttcttctttttcaacattgctttggatattttgaaactttttgtggttccatataaattttagggtttaaaattatttcaaaataatttctgtaacaaatgtcactgagattttgaaatgcaatcagttgtgaatccgtttcaattgttcttttttttcttacaatggtttctatttttctgctttgtcaaatgcctgataattttttatagtatgggacacacttacaccttaaaactttttgttagatggctgaataggaacagctccagtctacagctcccagtgtgagcaacgcagaagatgggtgatttctgcatttccagctgaggtactgggttcatctcactgggacttgtcggaaagtgggtgcagcccacagagtgtgagctgaagcagggtggggcatcgcctcacccaggaagtgcaagtggttggggaattccctttcctagccaagggaagctgtgacagatggtacctggaaaatcgggacactcccagcctaatactgcgcttttccaatggtcttagcaaacggcacaccaggagattatatcctgcgcctggcttggagggtcccacgcccacggagccttgctcactgctagcacaccagtccgagatcgaactacaaggtggcagcgaggctgggggaggggcctctgccattgctgaggcttgagtaggtaaacaaagaagccgggaaggtcgaactgggtggtacccatcacagctcaaccaggcctgcctgcctctgtagacgccacctctgtgggcagggcgtagctgaacaaaaggcagcagaaacttctgcagacttaaacgtccctgtctgacagctttgaagagagtggtggttctcccagcatggagtttgagatctgagaatggacagcctgcctcatcaagtgggtccctgacccccgagtagcctaactgggagacacctcccagtaggggcctacagacacctcatacagctgggtgcccctctgagatgaagcttccagaggaaggatcaggcagcaacatttgctgttttgcaatatttgctgttttgcaatatttgctgttctgcagcctgcactggtgatacccaggcaaacagggtctggagtggacctccagcaaactccaacagacctgcagatgagggtcctgactgttagaaggaaaactaacaaagagaaaggaatagcatcaacatcaacaaaaaggacatccacaccaaagccccatctgtaggtcaccatcatcaaagactaaaggtagataaaaccacaaagatggggagaaaccagagcagaaaagctgaaaattctaaaaatcagagcacctcttctcctccaaaggaacacagctcctcaagagcaatggaacaaagatggacggagaatgactttgacaagatgacagaagtaggcttaaaaatatcagtaataacaaacttctccaaggaagtttggaggatgttcaaacccatcgcaaagaagctaaaaaccttgaaaaaagattagacgaatggctaactagaataaacagtgtagagaagaccttaaatgacctggtggagctgaaaaccatggcacgagaactacgtgatgcatgcacaagcttcagtagccaatttgatcaagtggaagttcaagtgaatgaaatgaagcgagaagagaagtttagagaaaaaagagtaaaaaaaaaatgaacaaagcctccaagaaatatgagactgtgtgaaaagatcaaatctacatctgactggtgtacctgaaagtgacggggagaatggaaccaagttggaaaacactcttcagggtattatccaggagaacttccccaacctagcaaggcaggccaacattcaaattcaagaaatacagagaacgccacaaagatactcctcgagaagagcaaccccaagacacataattgtcagattcaccaaggttgaaataaaggaaaaaacgttaagggtagccagagagaaaggtcaggttacccacaaagggaagcccatcagcctaatagcggatctctcagcagaaactttacaagccagaagagagtaaaggccaatattcaacgttcttaaagaaaagaatttttaacccagaatttctatccagccaaactaagcttcataagtgaaggagaaataaaatcctttacagacaagcaaatgctgagagattttgtcaccaccaggcctgccctacaagagctcctgaaggaagtgctaaacatggaaaggaaaaaccagtatcagccactgcaaaaacatgccaaattgtaaacaccatcgatgctaggaagaaactgcatcaactaatgagcaaaataaccagctaacatcataatgacaggatcaaattcacatgtaacaatattaaccttaaatgtaaatgggctaaatgctccaattaaaagacacagactggcaagttggataaagagtcaagacccatcagtgtgctgtattcaggagacccatctcatgtgcagagacacacataggctcaaaataaagggatggaggaagatccaccaagcaaatggaaaacaaaaaaaggcaggggttgcaatcctagtctctgataaaacagactttaaaccagcaaggatcaaaagagacaaagaaggccattacataatggtaaagggatcaattcaacaagaagagctaactatcctaaatatatatgcacccaatacaggagcacccaaattcataaagcaagtccttaaagacctagaaacaaagagacttagactcccacagaatcataatgggagattttaacaccccactgtcaacattagacagatcaacaagacagaaagttaacaaggatatccaggacttgaactcagctctgcaccaagtggacctaatagacatctacagaactctccactacaaatcagcagcatatacattcttctcagcaccacatcatacttattccaaaattgaccacatagttggaagtaaagcactcctcagcaaatgtaaaagaacagaaactataacaaactctgtctcagaccacagtgcaatcaaattagaactcaggattaagaaactcactcaaaactgctcaactacatggaaactgaacaacctgctcctgaatgactactgggtacataatgaaatgaaggcagaaataaagatgttctttgaaaccaatgagaacaaagacacaacataccagaatctctgggacacattcaaagcagtgcatagagggaaatttatagcactaaatgcccacaagagaaagcagaaaagatctaaaattgacactctaacatcacaattaaaagaactagagaagcaagagcaaacacattcaaaagctagcagaaggcaagaaataactaagatcagagcagaactgaaggagatagagacacaaaaaacccttcaaaaaatcaatgaatccaggagctggttttttgaaaagatcaacaaaattgatagaccgctagcaagactaacaaagaagaaaggagagaagaatcaaatagatacaataaaaaatgataaaggagttatcaccactgatcccacagaattacaaactatcatcagagaatactataaacacctctatgcaaataaactagaaaatctagaagaaatggataaattcctggacatatacaccctcccaagactaaaccaggaagaagtcgaatccctgaatagaccaataacaggctctgaaattgcggcaataattaatagcctaccaaccaaaaaaagtccaggaccagatggatgcacagctgaattctaccagaggtacaaagaatagctggtaccattccttctgaaactattccagtcaatagaaatacagggaatcctccctaactcattttataaggccagcatcatcctgaaaccaaagactagcagagacacaacaacaacaaaaaagagaattttagaccaatatccctgatgaacattcatgcaaaaatcctaaataaaatactggcaaactgaatccagcagacaacaaaaagcttatccaccacaatcaagttggcttcatccctgggatgcaaggctgcttcaacatatgcaaatcaataaacctaatccgtcatataaacagaaccaaagacaaaaaccacatgattatctcaatagatgcagaaaaggccttcaacaaaattcaacagcccttcatgctaaaagctctcagtaaactaggtattgatggtaagagctatttatgacaaacgcacagccaatatcatactgaatgggcaaaaactggaagcattccctttgaaaactggcacaagacagggatgccctctctcaccactcctattcaacatagtttggatgttctggccagggcaatcaggcaggagaaagaaataaagggtatttaattaggaaaagaggaagtcaaattgtccctgtttgcagatgacatgattgtatatttagaaaaccccatcatctcagccccaaatctccttaagctgatcagcaacttcagcaaagtctcaggatacaaaatcaatgtgcaaaaaatcacaagcattcctatacaccaataagagacaaacagagagccaaatcatgagtgaactcccattcacaattgcttcaaagagaataaaatacctaggaatccaacttacaagggatgtgaaggacctcttcaaggagaactacaaaccactgctcaacaaagtaaaagaggacacaaacaaatggaagaacattccatgctcgtgggtaggaagaatcaatatcgtggaaatggccatactgcccaaggtaatttatagattcaatgccatcccccatcaagctaccaatgactttcttcacagaattggaaaaaactactttaaagttcatatggaaccaaaaaagagcccgcattgccaagacaatcctaagccaaaagaacaaagctggaggcatcacactacttgacttcaaactatactacaaggctacagtaaccaaaacagcatggtactggtaccaaaacagagatatagaccaatggaacagaacacagccctcagaaataataccacacatctacaaccatctgatctttgacaaacctgacaaaaacaagcaatggggaaaggattccctatttaataaatggtgctgggaaaactggctagccatacgtagaaagctgaaattcgatcccttccttacaccttatacaaaaattaattcaagatggatcaaagacttaaatgttagacccaaaaccataaaaaccctagaagaaaacctaggcaataccattaaggacataggcatgggcaaggacttcatgactaaaacaccaaaaacaatggcaacaaaagccaaaattgacaaatgggatctaattaaactaaagagcttctgcacagcaaaagaaactaccatcagagtgaacaggcaacctacagaataggagaaaatttttgcaatgtacccatctgacaaagggctaatatccagagtgtacaaagaacttaaacatttataagaaaaaaaatcaaacaaccccatcaaaaaatgggcaaagaatatgaatagaaatgtctcaaaagaagatatttatgcagccaacagatacatgaaaaaatgctcatcaccactggtcatcagagaaatgcaaatcaaaaccacaatgagataccatctcacaccagttagaatggcaatcattaaaaagtcaggaaacaacaggtgctggagaggatgtggagaaataggaatgcttttacgctgttggtgggagtgtaaactagttaaaccattgtggaagacagtgtggcgattcctcaaagatctagaagtagaaataccatttgacccagcaatcccattactgggtattcgcacaaaggattataaatcatgctgctataaagacacatgcacatgtatgtttattgtggcgctattcacaatagcaaagacttggaatcaacccaaatgtccatcaatgatagactggattaagaaaatgtggcacatatacaccatggaatactatgcagccataaaaaaggatgagttcttgtcctttgtagggacatggataaagatagaaaccatcatttgagcaaactatcgcaaggaccgaaggccaagcaccgcatgttctcactcatgagtgggaattgaacagtgagaacacctggacacagggcggagaacatcacacactggggcctgtcgtggggtgaggggacgggggaggaatggcattaagagaaatacctattgtaaatgacgagttaatgggtgcagcacaccaacatggcacatgtatatatgtgacaaacctgcacattgtgcacatgtaccctacaacttaaagtataataaaaaaaaaagagaaaagaaaaaaaaaacttttgttgcttatccgaaatttaaatttaactaggtatactctattttatctggcaatcaggtgtcctgagactctagcttcctttacttctctggactcccatttttgtctcctcaactcaggaaattctccaggctctgcctgagttcccactcattgtgttgtatcctggacacactctcatgccagtaagctgatgccaccgtaggggtcaacttttttgtttcctgactctcagattgttgtccttcattgtcagatgctcattatcttaaaacataatttttcatatattttgtcctttttggttgtttcacactggagagcaaatctggtctctgttactccgtctttggttgaaagtggaagtctgtatccagaagttattgtttatagccaggagccagaacatggttctaaccagggccaaaaatgtgtgtttgatcccttcataggtgagtgtgtagtttctttatagtttttatgcaattaactactgaaaaaaataattctttgggtcataaaggcgcctggtgattatgagggttcctcactactgtcaggaaattgattagaagtaaacatcttctaataagagaatgggatgggccactggggttattaccaagtacaaagcataaattggcacattacattgtattacattgattgtcagagtttgaaccaaaatatagatttggctgggggtcaaatctcggaggcccaaattgtatttggagtcagggccaggaagacaagtctgatagagtcagggtgatcaaactggggccatagaggaatttaggaagatgtaaattctcttattccttgttcaatattcagtgatattcttcctagggggcttggaaataaaaataaaagcatgtcctctcttttctctttggtttctcttggtctagctatatgccgctatcctctgggcatgtcaggaggccagattccagatgaggacatcacagcttccagtcagtggtcagagtccacagctgccaaatatggaaggtgaggatggttacatcaagaaagcccatgttctggggttgggcagatttcctgggcacagattcctgaccctaggggctggggaaggtggtgttattggcaggaactgttgagaaatgaaggacagacagcaagtgggcctgtcctgctctgtatgttttcagggagagaatttaggacttagccacatgtactggtctggcagccccatctcaaccacagaggccccagggccacattacccacagtgaatgggttcattgataggaagtggatttgctttccctgactttctcattgtgagctgctgcaggaggcaggcaacagtggcacctatgggaaggtgcagattatgtaggacactgggagttagcatccactcctcttctcagtgggtctatgaaacatcactcactgcaaagcatcactcactgccaagcatcaagacactgaggcctccaacaagttctccacctctctcaaggatctcttacacagaagggccatccttgccaacagacagagtgtggcagtttcctggggcgattgatttcaggggtcttgtacatcaataaactccctactgctctactggttggacccaatactctacctggaatcttattattttgtgaagtattgattttattaaaatggaattacccataagaaaatgaatcctgatgaacctttccccttaatttcttagtgtatgaaagactagagtgatggtaggtggaattggaagggagcaacaaatgaatgggtaatatctgtgagaaaagggagcaatccaagggagaggaaaagtggtagggagttctcaaagtaaactttataataatttcacaattttgctcagtggtagctcagcctgaaggtaataaaatgaaaccagattatttactacttccttgacatgctcttccccctcatcctccccatgtgtttctatggctccttgctggtctgcaatgcccatcctgctgcattgcataacccacactggagaccctactatccctcctccctattgccataacttgatgtccaagcaaagggtggctagctttgttaggctgagtttgaaagagggaagggaaatatgaaatgactcatgcgggaacagagagtaggaagagttttatttctctttatgcttctaaatcaggatgggaagtgaaggctatgtgtgatctgaaggcctcagctcactgtctttcagggtctcatggtactccagggaaagggatctgaccacaaatgggtactgtggtggcagtgaaaactgtggcaagaacccaaaatgtttataaggacagcctgctctctcccctcagtacagggcagctgcttgcctgtgaaccagtaaacagctctgtggtttcatggttgctccctctctccccaaccctcacctctcaaggctggactcagaagaaggggatggagcctggtgccctgagattccagtggaacctgatgacctgaaggagtttctgcagattgacttgcacaccctccattttatcactctggtggggacccaggggcgccatgcaggaggtcatggcatcgagtttgcccccatgtacaagatcaattacagtcgggatggcactcgctggatctcttggcggaaccgtcatgggaaacaggtaggaagaagagacatccagatcctggatgtccaagaccatattttgacttaggctaggagaagaagggtacaggttttctgtgtggatatgtgtgtccacagaccaggcatgcccttgtaaatgtgtgacccagggtgagggaggcagggaaggaatatcaaggctgtggggaaagcagagtagatgcattctgctcctcgaattaagaagagagagtccatcaaaaacgtggtggggtgaagaaaagtgagcatgatttaataccacctcttcactcattctcttctctctcctcaggtgctggatggaaatagtaacccctatgacattttcctaaaggacttggagccgcccattgtagccagatttgtccggttcattccagtcaccgaccactccatgaatgtgtgtatgagagtggagctttacggctgtgtctggctaggtaggtcactagcccaggaagcctatagactttattaaaaactccaacttctgggaaatgaaggcaatcaaatcagaaagggatgggatcagttactcctggaatggtgatgccctcttgggaagaatagagacagaagcattgctcattaacccagggcttagggccccacactgagtcatgcattcagagtcattacgttgactgccatggaggggcactcctccaaagtcttccctcggtgtccagatggagtcctgctggacacgctgtgcaagcttatacccttgaaactcacatagttccctgaggtaatgggcctgagcagtaggcactcacttggctgtgtttcctttgcagatggcttggtgtcttacaatgctccagctgggcagcagtttgtactccctggaggttccatcatttatctgaatgattctgtctatgatggagctgttggatacaggtaaatcctgggaaactttattagaatgggaaattggccactaagaaagaataatattttatcatgtcttgggatcaataatcaatcaaccaatccgtatttatttagttcttgtacaaggcatttggaaataatttagatgaaggaatacacatgacctttatttccagggaacttaaagcccggtttgggaagacaagttaattacccagaaaacaatcaattacacaaagtaatggctaaagtttgtgatatggctctaagtataatagccatatttttgaccctcaaaacaggacatgtagtctgacacaaatattgacctacttatggaaacaaagggccagagaattgaagtaataagtataatactctgggcaagtcaagaagtcagaaagaatagaccttatacatataaatgctttgaaatttgtaaaaaggggactagtaagacttacaatagacaaggaaagttctaggttaagatgagaattgtagcagaggaaggtaggtagaaggtagcagaagaaaggaagcagggctgaaggcaagactgacctggctatagtagaagctggagttgagaagaacagaatggaacaatggataagcctgaagtggatcaaaggagtgccatggcaaagaagtgtgaccagatatagtaggaacttagggttgggtacaggatgctcccacctataccgtttcacttcaagcctttcagccttgccattcttctagcccacactaacacttttctctctaagcttggtctgcatctgcaaagtgagcctgggagagaattcagtccatcgtgaagaccagaccagatgatggaggttgacagggctcgagagaaggagatactagtgagtctcaggaagggagtgtggaattacagccttctactggcttaggtgtggagaatgaactattgccctctagctgccatcccctgggtgaagacctgattcatccactcttctactcctagtcacttcctttccatcttcttaatcactgttctttcctttttgcttaaacggtcttggcataatttcgctcagtcacaccccaacaggcatgtattcaaggcacagaggaaatcagagatcaaccgaattcagtttaatttaataagcctttgttaatcaactgttactatatacaaggaatttggccaggcatgttaggtattcaaaggtaatggagtcattgatcctacctttaaagtgctcacaatttggagtaggggctaaaacagaatataagttactatgattcaagtatatgagcaagagatagcctatgactgctctggggttcaaaggaaaaagtaaactatagtaggaaagcacaaaaatggggatgaaaacatctggatttcatataataaaagttacttctgtttgctacaaggcttaagggattaaaatgtgtgtgaaaagcatttcgtaagataaattgctatgcacatataagttgttatctgattatcatttttctgaatgaaggaccagtaaagatatggtagaacagatgaaatctgaactgggtcccaaagaatgggtagtactttcacaggtgcagaatcttgaaatggaattttaggcagagggaataatagcatgaggaaaaaagaatcatggttataaagtttaggggactgtctgggagaaatcaacagtttatttaaccacgggccatatttatgtggcaaagtagtgcaggagaagcaaaacaaagcagattatgccatattttgaaggaacctgaagtcaaagccaaaaggagcaagaagtggaggaggaggaagaggagaaattgctgttcttattcttcataaacattatcattaatgtaatgagtcattgaagatttttaaagctgaggaaggacatgattggagctgtgctttagacagattaatcaagcagcatgcaaaggttagattggaatggaatgaggaggctatgaggaacattttaaaactcttagttctgccaagtaaaaagaattaatgaccaaggccataaccgtgactgtggggaatgaggaaaagatattcatttaggatgtttgaaatctgattggatgtatgaggcaaaacagtagggtgagaaaaagggtcagatgaagtttgacagtctaagtgactgaaacaatggggatgacatttatttattcgacaaatatattttgagtgcttaccttgcgccaagcattttccattactatgaagagaagtataatttatggaaaagggaaaccaaggagaaagacttagttcagtaggggatgatgatggatttagtttggagtgtaggtctgtgagactgagaagacattcagtagagaaataaggaaggtagccggaattatggctcttaactccaggggaaagataaaaaaaattacaaaaatgtagacatcattggctttcatttaataattgaagtaatgaaatatctggtggaggtggctgagtgaagagatcctctcagccactgagagatgacatcagagtctcaggaaatagtcatattagcaaaagttactttttaaatttaaaacaatttcaagaataatatatgcttactggtgattttaataactctaaagtatataaatattgaacatttattttcttatcccttcttcacttgatttaattttgaccaagggggaactgaacaggcattccttttaatttctgttgcttttcataaaactttcctgggatttatttttctgaggataatgggaaatatatttattgcaagtaaacttacgttctcctagctttctgatctgtagagagaagaaaaagatggcaaaaccttggaagggagatccaggctctggtcactgtggataaggccagtcaaattttataatttaccaaacattttcaatgattaaatatattttaaaaggctggcataatcacccttagtatttttttattttttgcgattcacaaattttacatattattgatctagctctaaacctcaagggtcacaccaattattgcttgagggtgagtatcccaatctcgtcatttgggaaatttgtgtcatatctgccagagcttgagatgcagagcttgaggaaagagaagttccacatgatggtttttgctctgtccctccataaaaagaaggaaggagcctcttcgtgttctctaagtagtcaaataagcatacatgcagttatattccatccagcagtcaggcttctggaaaactcagcctttaaaacagagcctcttactcagaagtcaaaaaagcctgctaagctagaacacaaaactaaatccaatacctgggattctcatgaaatccttgcatcttacttcctgggtctagtatcctacaaatttaattaaaattaaatagaaattattatttaaatttagagcttgtattttcccccttagtttaatatcaaactgggttgttggatatgtggaatagaagagagtgtgactggattctctgaaattgattcactgaacaatgacaatatgtagttaaaggagagtcagcaccaagctctggaaacatttatatgatagtggggcaagtgctactatgtatggtagcattcattctatgcatttatccatttcctcatttactctatgaattagttcatcaaatgcatttgataatattaagtcattatgtgaagacatattcagtatataagaataggcaaggtgcaataaattatagaaagcttttcatattaaataagacattgtttaaaagttttactactaaaggagtaagcatcaaatattttataaaaattactaatatgaaattcttagttctccattgatgcaagataaacgagtcaatactataatgcaaatctgattatttacaatccttcaattccaagataataagctcatacaaaatctggagtgaagatgccgggtaaaagctcttccacgaatgtgtggttaactcagatttctctctccttttcctcctcttctcctggcctgagcagcatgacagaagggctaggccaattgaccgatggtgtgtctggcctggacgatttcacccagacccatgaataccacgtgtggcccggctatgactatgtgggctggcggaacgagagtgccaccaatggctacattgagatcatgtttgaatttgaccgcatcaggaatttcactaccatgaaggtcagtggggtcgggtgtggtggaacttctttaaggaggcacaaatcatagtgtggtagagaaaaggcatgctagaaaaaagtctaggctgatgccagttcaatgacatattctgttactaactagctaaatgcatttcacaagtcacttcatctctaagggcgtgattctccatttgtgtgtaagggagttagaataggtcagtgagctctcttttttttgttgttttgacactaaaggtgacatatccattaagccaataacacagtgtccagggcccacagatttttaagacgcataaaaatgctctaatttcttttaatatcaggtgaaaaaaataaatttttagggtcaaagattatctttttaccagcacagttgtgtgtgtgtgtgtgtgtgtgtgtgtgtatacacacacaactatatatatatacacaatgatatatatatatacacaactacatatatataaccatatatacatatacaactatatatatacatatacaactatatatgtatatacatatacaactatatatgtatatacatatacaactagatatatgtatatacatatacaactagatatatgtatatacatatacaactagatatatatatgtagttggtgttctgcagtcttctgaatttttccttctaggaacctcacagtggcagtgatagttggtcaggccttataaaacctgggctgcaaccctggttacctgtatgcactgtctgcccttggccacctcacttcatgttgctggactgcagttttctcatctgttaaatgaggactgcaccagcatcttctcagcccttccttgccttgaactctctcgagtctataatcctctcagccgcagttgccgtctaccctgattcgtgtgtgtatctatacacatagatacatacacacatatgtgagaatatgtgtattctcatttagaaatgagatttctaaaaaaaaaaatgaaattgttttagattgtacactattttgggtttctcacctagccctgtgaaaagaagaagactggctctgaaatgtacctaggaggaagcaggatggcagtcttcctcttacctcagttcagaatagctcgaatcagggtagacggcaactactgagttggctggcactgtgtctccatgcaccttagcagggccaacctatcactcacatgcctctttctctaccaggtccactgcaacaacatgtttgctaaaggtgtgaagatctttaaggaggtacagtgctacttccgctctgaagccagtgagtgggaacctaatgccatttccttcccccttgtcctggatgacgtcaaccccagtgctcggtttgtcacggtgcctctccaccaccgaatggccagtgccatcaagtgtcaataccattttgcagatacctggatgatgttcagtgagatcaccttccaatcaggtagggagctcaggtcctctttgggaagtgggagcaaggtgatgaaggaggaatgcacatgcccagaacttctcattagcaggtctctgagaggagtgggattgtacaggcagcttctcattgacggatacggtgaatcctttgtgtgactagttttaattgtggaggggatgggatgagaatggaagtgaacaaaatatgcacgtaactcttcttagaaagaatgtttttaaatgagagtacagtgtgttaaaaattttatataatttaaggtagttaacgagtgcgctgttaaggaaaagcacacctaagcattactgagatatttaaatgaaaatttctaaatatacacaaaagtaaagagaacaataaaccactcatcactcagctttactaatcattgatattttgccatatttgtttcacccattccttccttttggctgtagcattttaaagcaaatatgagatactacttgatttcattagcaaataattggactgcatctaagaaaatagcatcattttcataggtataatgccatgataacatctaacaacctttattattaaataatttcttaataccacccaatatcctgtccatattcaagtatgactaactgtccatcaatgtcttaattcagttgactttatcaaataaggatcaaaataaggatctgttggtgagtttctttattctatttgctctgtgtctcttttaatctaaaaaattccttccatttttatttctttttaaatggattctggcttggctgatggctttctgtggtgtcattttacttgagcttctgttctctgtcattcctaatgactggtgcttacatctacaggttaatttgattccagttcaatatttatttttgtcaagaattctttataagcattctatatatctcagtaatgctgtatattttatgctgaacttcatcatggggatgtaatgctagatcctctcactttttgtgatactaagattgatttctggttcctcatgaactttttccctaagttttatcctccatcaataaccactgtctgaattatttatttcactagggttgctaaatgacgattttctaattcttttattttttctgcatttcttagctgaatttcttccgaatagagtaactattcttcatcatgcaccagtttactcagaaatcacattgaaagagcagcatacgtgacttatcttcccctttaattgttaattttcagaataatgacttgataccgtagcaaccctcaataatgtctaattaattttggtttttacccttatttttttggtatcattataaactcattgctttttatcaatttaatgcttaatcgattgcagttattattattagtagtagtatgtttatttttagacagagtctcgctctgtcacccaggctggaatgcagtggtgtgatcttggctcgctgcaacccccgcctcccgggatcgagtgattcttctgcctcagcctcccaagtagctgggattacaggtgcctgccactgcgcctggctagtttttctatgtttagtagagatagggtttcgccatgttggccaggctggtctcgaactcctgacctcaagtgatccgcctgccttggcctcccaaagtgctgggattacaggcatgagccaccgtgtctggccattattctttttaatactcaagttgtgctgtctttgactagagtttgcatttttttttttttgagacggtatcttgctctgttgcccaggctggagtactatcttgagtcattgcaacctccacctcccaggttcaagtgattctcctgcctcagcttcccaaatagctgggattacaggtgcctgctaccacgcccggcttttttttttttttttttttttttttgcatttttagtaaagacggggtttcaccatgctggccaggctggtctcgaactcccaacctcaggcgatccagccacctaggcctcccaaagtgctgggattacagatgtgagccactgcacccagcctagagtttgcatttttaagggggctctttgctcttttgatctgaccctagaagcctttgataactttcttgttttccgaaagaacaaggtatttcaagctcattttgaacatgtacagcatccgacgtggaatcaaccatttcaagaaatcttgattccttttagtaggaaatggtatttagaaaacacaaactgggtagtagggatgctcattactaataggttgtcattgtttcttggatttttcggtggaagaaagcaatgaaatatgtatatttaaaaagaaagattgtgagtttacattgttacttccaattcaaattaaagataaggtttttatttaaagttgattttatacgttcatctctattatttatgctgaatatcatgtttcctaacaatgttaacagcattttcttcatcctattattcaaaaagcaataccaatattattactagcaacgtaactattgaacattaagatttcttagcaattctcttttctttgtcctgagaatatatcctactaagaatgtgcagtcaaagcactatgttctaaggtcagttgggtaacagtgggataattcttttctgtatatagttatatcaccagtgtggtatacagttagggtaacagtgggataattcttttctgtatgtagttatgtcaccaatgtgatatacagttaggttcattgtattccatttgtttcaacctttagggattccttttaaactttaaacactacttttgattgaacagtaactgcagcaaatagtgatttaacttactacagccagaaactgtgccaaatcttgaaaagttaaaaggtgtttagaacattgttcataccattaaatttaaatgggaagatgaaagatacagaatgctttaaaaaaaaaaaaaaaaaaaagaaatgtccaaagcaatatgaacaataaatggtcaggaggagagaggcactagcgtgggtttgtcatagacagcatcaaaggaatgagacttgtactgggcctggaagaaaagtccaggtgtaaaataacataaaagagaggaagagactaatttaaagataaaccacactttgggaggccaaggcaggaggattgcttgtattcaagagtttgagactagcctaggcaacatggcgaaatcctgtctctataaaaaacacaaaaattagctgggtgtggtggcacgtgcttgcagtcccagctacttgggaggctgaggtgggaggatcacctgagccctggaggcagagcttgcagtgggtcgagattgcaccactgcactccagcctgggtgacagagtgagaccctgtttaaaaaaaaaaaaaaagaaagaaaagaaaaataaatcagaagaacccatcctttcagatttgatttttaagggaaaaaaatttcaagatggtttgcttattaagatgtactgataagaaaatagagcatatttttaggaaaacaggtttggtgtttaaatgccttctgtgctaatgatttaatctaagagtaagttgattgattgtttcatctgaatactgagagtagaaatcaagatgctcaaagtcagtgccacttacactgtaagtgttaactgggggacaaatagattcccacccatcctcagggattctcctggcatagtaactggtacacttattatagctaattatagctatgaaccatggtttttactcctggggtctcttgagctttaaatccaatgcataataatattagttttcaccggagcctgacagccgaactccgaaagcacatgcagaggccagatacctccttatttatataataatattaagaagaagaaaaattaggatacctggaagaaatgtctcttagaaaggaaatacatattctaattcttgacccccttgattagacaaatcagagggaaaaactctggcaaagctgccaacatcaatctggcaaatacgcttttgtggtttagtctcaaaagctgtaaaatcacagaaaaagacactccaatgtcagtaaatatctataaagattaagccttaattcataaattgaagggctaggccgatgaggcatagtggagactcttttataaacaatctaatatccttgaaggaaaaagcatcttaacactatgtctgtcccttgcccatttacccgctatattctgtctatattttcgctgaatttgggtcctgcttcttatgctttatgacaatgtgtggtacagccctttgaatcactgtttcttaaacttttttgtaccatagcatctagtatgtaatatgtgaaacaaaaattttacaaaggaaaacttgcttttactatttagataaatggtgattttttattcaacgtatttatgattttatctttttaaaagactgatgacaactcactaaattgatcttgtaatgtgctaggtcacaatatgccttcagagaaaacactagctgtctgtcttctccctggctctgactcacccttgttttataacagatgctgcaatgtacaacaactctgaagccctgcccacctctcctatggcacccacaacctatggtatatgtgattcctaattacacaaattaatttgaagggacttactgggggatgaagaagggtggagagttgcaaagccctggctgtgtgggaggctttacaccagttggctttggatgaagagtagccctggaaaggtaggactgtctacctccaagttatggatccaaatatactctcttcactatggattcatgtgcttcttcagctgaggcagagtctggagttgtcctaatttctccatgaaagtttgggaatttggggtcagaaacagggaaagggacattcctgggtcagacccatagtgggtatttctaaggaggggtggaaatcaaagaaacaaaatgctgatatctccaattggagataaatatgccatgtatgcattgctttaggcagtcattggtgacactagccagcaatgtgggaaacatgtgggattgaatgtgtccaaagaggactttcagctaccttggcatgtctcaaagaatgcagagagtgaaactggttcctcacctgtttttcatgaggtgtgattaagggactacagactcaggccataataatacagagacaaaattttgggaagaatagaaaaactcaccattattctgtctgacacatggagagggggagactactgtcttatggaagagggaaataggataggggaacaaagtaataaacagattgggcgtggtggctcacacctgtaatcccagcactttgggaggcagaggcaggcagatcatgaggtcaggagttcgagaccagactggccaacatggagaaaccccatctctactaaagatacaaaaattagccgggcgtagtggtgcatgcctgtaatcccagctactcaggaggctgaggcagaattccttgaacctgggagggggaggtttcagtgagccaagatcatgccattgcactccatcctgagggacagaacaagactctatctcaggaaaaaaaaaaaagtaataaaacagtagcaagaaaaaaaaaaaaacagtagcaagagcaagaataagcagaagtattaaggtggcatcttccataattatcctcaaggaacagggtctacctccatgtttccagttcagtccctcatacttttacttgacctgtgagatgattgtattctctgccttctctccctggtcacagatccaatgcttaaagttgatgacagcaacactcggatcctgattggctgcttggtggccatcatctttatcctcctggccatcattgtcatcatcctctggaggcagttctggcagaaaatgctggagaaggtgaggaggtgcagaatggtcatgatataagaaactgctcctttctttcttaagccactgttgtcccaggagtaaaaggcaaattgcaaacatttattaatggttggaattaactgaggctaccaagaaacataggaatgaagccagaatagaattagctaagtctattttctcatttttagagtggacatgttggaaccttcctaacgttcctcggaaatgcagaaaactcttcttaatacattgaatctccattcaggcattttccttgaagattctgattcactggattttgggtagagtccaggcatccatatttaaaaaaaaatttaacaagtgcttctgatgcacattcgaggttaagaattactctcctaatgccaagctgaaatttctgataatgctgttgaagttccttctcatctttttcactttgcttgtctgtttggtgtgtgtgtgtgtgtgtgtgtgtgtagaaaaacatccagcttcattaatattcaagccaagtttctcactattctatttctacttttgtgtacttgaaggttgtgattatgtatccctctgagtccctcttcagactctgtctatgccaaatgatctgaataactttttacattgtctaacactttacaggaagcagaatttttcctcatgcataattttatatacacctcattgagtaataactcataggcattgttatgtttaactatttttctgatgagaaaatgtgatgtgcttaaggtcatacaactgatgtccagtcttctatgctttttccaattgttaatattgaaatgcattgatttctttcttcaaaactatattcatttcatcaaagatggaatatctatgacttgtcttggtttcttggaccaaatagcaactcccttggaccaaatagcaactcactgctgcttagtgtctgattcttttggggcctgctgacgactaagtgtttctgcctttggccatgatcacctctcctggtcaattagttcctctcaatagacatggactagtagaggccacaggaactctgagctgtggggctttgaactgcctcctgagggcagggaataggaaggaggagaaatcctgattgatttctgtgtttgggggtggggactcagaggagaccaatgcctgtgtggaacctctattccagaggagaggaaagggcaccatgagaatgggcttgagtctctagagctttctagatgcaggatgggagaaaaatggctcaaatcaggggtaaggaggagcaatcctgatgagtagcctgcaattccttctgatctgtgccaccctcaggttcctgagatggttgatgtttgttttaaggtttttaggaaggaatatttcatggaagagaaggtctccttgcttcccacaagtatgtctaccagtctgaaaacacttaaagctttcaattcgcaaatagcaacagaagactgaaatacagaatccacagagactcactcgctgtcacgagtatgtctcaaggcatgaatgaggcaaatatcaaaatttttcctcctttagaatgctggaaaacactagtgtttaatgaggtattccagagtgagggtggtggtgaactgaaggttcattgaactgcttgaagaggatatgtgaccttcttaaatagtctgttaggaccacattttagccaagggggaaagtctgtgttctctgctatatgagctctttttctctttatttgagccacaatttaccatacttctctgagtctttattctgaggcctgttggaatatcttcatgggctaagagagaaatgttggaatctccaggtaaaaggtagagcaaacattttgcccttgaatatttaacttggtcctccaagaaattctacccctgtacatcctgagtaagatgactcaaggtgctctggaatgacacccagtgtttcttcctgggaacaaaattttatgtggaaaatcattaagtacacacatacattctaagaacattacttaacatagctgtagactgtatgtagcattatttgtaggataattttggtggtgtcctcaacattccttctttgagagatttaacccacatatattgagtacctactttgttctgagcttcatgcttagtactggggatattactgcaacaaaagaccttcagtctagtggaaaagtgcacatctaagtttcgccattgagcaccaaagctgtgtttgttggagtggagcattttacatgtttaaacccaaatagtcacatacatgcaaatgctggcatttgccttttgatggagcaggcaggttatattagataagataccacagaagtagttgctttgttgttctccctcccttattaggtgtaagtcacattgttatctctggacacccagggctttcctgtcccatgttgtagccattttatttttggttagtgaaaatatgggtcagtggtgggtattatcctaatctagggtatcaaaatgatcaagtagaactactgattcatcatgttatagcacatgcattaagttaataaacaatttatgtctattccaaaaccaagtagttaaagggtaagccaggaaaacccatcatttaataaaacatagaaaactctataagattgagatctttggctactgatgggttcttatagcaacagggagataatcttttttttttaagtgtttcagaaagcacatcatagaaattagaagatcaaattctaccttgaagaaatgaaggattattctaagttcctacaacacaggcatttgtggaaccagactgcattcctagcacgtgcagtgttgctggggttaaacagtagtaaagagttatttcatttgagtgggagagctgagtttaagaagaggaggcattgaccatctcttttgtgccaacatgcctttctccttgctcttctcttccaggcttctcggaggatgctggatgatgaaatgacagtcagcctttccctgccaagtgattctagcatgttcaacaataaccgctcctcatcacctagtgaacaagggtccaactcgacttacgatcgcatctttccccttcgccctgactaccaggagccatccaggctgatacgaaaactcccagaatttgctccaggggaggaggagtcaggtgaggatgatgtggtgggcagggcgtcaagggagaaacctcagcaagcatcaggtaggtatgacacgcctgctcccagttcattgcatctatttttagtctctgctaacctcctgagaagtccacattctctttctagatttggtctgccgctgctcctggcctaatttgagcaactctcctttgctactgaatataagatgtgtggagggacccacataccagaaaagaaagaaaaaaataataaaacatgtgaattaggtgttgacaccagaagaacctaaacagtccaaccagtctaacctcattttacatgtcgggaaagtgagaaagtccagatagagtactcacccaacaccaaatttcatgagtgggtaaaggcaggactagatttttacctggagaaataaataaataaatgaagctaaagacattccgaaattcccagtggtgtagccatttaaataactaaaataaataactacttgagttatctattttttgttaatttctctttggtaaacatttattagagtaatatgagattttattatgagagtaaaacatttctcaccttttctcaataaaagcattgaaataaaacaataaaacaggtaaaacagtaagtagtgtcagttgattcaaatttcgatgtctttcaaaaaatgatgcagagtcatatcagaagggaagctggagtcacctctttagctcagagcaacttttctataagatcatcaacctgagggacccgagtcagtagaaaagaacttgtagtgttcaggagagaggagctaggcctgagctggatgtagaagcagacaggactaaattcaagagcataggattttataggaaggagcctgaaggggtcttttcaaaggataaaaggaaacttgcatctattttattattcaatggatagaagacatgaaagagcatgctaaattcaagtaatttcacagagacagcaagaataaaggatataaactaatttatttcttggggtgaatggaagtaatttacctatttcctaagtctaaaacatcccccacttcatattttaaggcttttttaagttagaatatgtcttaagctagatcatatgtctttaatctgaaagttttttatacctaaaatcagtttttaagtcaataacagtgtcttaaaattaaggaaataagttattaaaccttcaacctttaatattcccaccctgatataccatgagccttcctatagcttcaccacacaattccacaagtttagccacagaatttgttaatgatcatgtattatgaggaaaagaatgagaaataaaatgatgttctacattctgtaggccacaagaaaatctctagaggaagcaaaaccattttccaagtaagaatgtcatgaagcaggttaggctttcacaggggcatgttttagccctcctctcagagttccttcctgaagagatctccaaagacactccacggaatgagggctcgttgcccttgtcttcccaggctgcagcggtgttgtgaagccagtccagcccagtggccctgagggggtgccccactatgcagaggctgacatagtgaacctccaaggagtgacaggaggcaacacatactcagtgcctgccgtcaccatggacctgctctcaggaaaagatgtggctgtggaggagttccccaggaaactcctaactttcaaagagaagctgggagaaggacagtttggggaggtgagttgattctttgattcccttatagctcgaagaaggtggttggataaaaatgatcagtagaacaaagagtcccttccagaggtggattcacaacagaatgtctcttccatttgtctctccttgcattgtcctctggattccagtattgggtcaacctaatctttgtcaaatagctgtggagttcctgggacttctgatttctatataggagtttttaaggcaggcaagtcactagacttcagatatcttgaaaaacattcaatattttcaaaaatgtttacaatagattatggagggtgggatccagaagatgtgatcatcttttatgaactgtccaggaacattctgctactcaatagccactttgtttttttcccctttaatgggagttatatgtaaaatggtcaaaaacaacctcgcccctgcctttggtcccagaatcagccactagggaatgaatcaccaactaggataaggaggagtactcttttcatttgccctcagagtgatgcatgcattattaaacttttcattcttgcatcagtcacatgaaccttctgggagctcaaagcaatgttttgaattctaataggaactcttcaccactgccgtctaaactccaaataaaacatttggtttcctaagacatgttattggttttcagtgtggatctcatgttctctccttagataggtctggtgttgcaagaggtggagggacccatgttatctgttcatggtgtgacatgtactcattctgtcccctgggttgaaaacccacatctgttatactgttactaatacacaggagtttcttataatgctaaaccctatactaagggattattttaggaaattgccttacgttttacatgatccagtgactaatgaatcgaagttcaagcatttgtaataaaagacattttatattgggctatgctgtaatataatattgttattgattcattcattcacttagtgttccaagcaatgtgtatttctaaggcaggagagtggcacattagctgggtactttaccattgttttaaatcttatcaattatttgaatcatagatatgttacacatatcttcttattggtcttttgatcattttgcctgagttgtaagagttagtttatctccaggaaatgcccagcaagagtactgagacatcttcaggagaaatgatgatgctgagactagatgacttttgtctaggttcatctctgtgaagtggagggaatggaaaaattcaaagacaaagattttgccctagatgtcagtgccaaccagcctgtcctggtggctgtgaaaatgctccgagcagatgccaacaagaatgccaggtctgtggtctacattttgaattttcctttatgtatttcatctttaggaccaggaatactcctggatacttctgagcaattttttcttttgagatgggaaggtcagtgagctgcctcccatttccactgttatcctttttcttattccgatggggtcggcagtcctcatctttttctccacctctctcaaacacaaaggtacattttccattgtacttgccacatatttacttcctaaccccctgtgcacaagcactgtacttgttcccaacatatacaactgtctaaatgtgtacttctttggtctttatacacagacatactcctgcatgtcattacctcctcttgacaaagtcttcagaatcacacatgactttcttgctaagcctcttccagtctccttttttcacatttctatttattttctcatcccttttttctcttttatgctccttttcttctatctccagcaaccctcaaaatgagaagctacctctatttggaaaattatctatgaacctcaaagcaaaaggatccacagttctctagcagttttccaaactggctaataatctcttggatctttttctacataaattgcagtttccagccacacttcattgtctgacagcctttccattacaataatggtgagttaatcctcacccagagagacaagctggttgaaagctggctgtatgtgtcccagagaaatctccacacctggataacatatgcattttcccatttgtgttgtcttgatttgtctcactgatattcatagtgaaaaaaagtttattattcttattttccaaattatcataaattccaagaatggtgatagacttcattaaaagtcttgcaatggacaagatgtaagataaagaagagagaaaggtgaggaaatgaaactggaggctttagaaatttaactgataatttcaatctttaagatactggtaagaataaaaagtgacattctctgggtcttatagagagacgaagtatttcttatattaatcttagcacatgattggagaaagtggcatgaggggaaacaaaaccaaaccaaaccacaggacataggatatgacaaagcctttctccgttgttccgatcggtgaagtttgccattcctccacctgtgtccttagcaatgatggatggccatgactgcgaaccctcccaagccatggaaacccctggtttgagacggaagggggaatgaaagaggggaggtgttgcatcaggacggcattgattccagtggtttatattgacgtagtatgacttccagtccaggattcctagcaaactcttggagggcttataactcatctgctccaacagttttgggaatgtgggctagaggcctcactaacaaaatcttgctactttatgacccaagggtgtctgtcaccatgtactcaaacaattattagtcttggtcaaatgaatacttcttttgacatgattaccaccacagcctttaaagagctctgttttcgacaggctactaaatacatgttgcaactgactgatggttcgtactgcattaagaaaagtcagtatgagaaaataaagagtaatcagataagccaaagatggttgttcacatcatacaaagtttcttcactagtaatagagtgactccatggctttaaaaaaaaaaaaaggtaaatatcctcgtgcacttaagatatgattttcagtgaaacattttactctgtagagtggtttttagcagcctatttttgattcagcaaatattaatcactttctgtgtggcagggattttgttagatgtgagggatagaaatgtgaataagtcatggatcttgttctcaaaaacattacaattgaataagggcccatgatatttcaggaggaatagaatgagacagatccaggtgtcaatttctctgtcctctcaaaagttatccaaagggaaacaagatttggcataatgtccaggaataggccttggtgtgcattcttctctctcttgattctgactctggcaacttctgagtttatctatgtctgtatcctcccaaggaatgattttcttaaggagataaagatcatgtctcggctcaaggacccaaacatcatccatctattagctgtgtgtatcactgatgaccctctctgtatgatcactgaatacatggagaatggagatctcaatcagtttctttcccgccacgagccccctaattcttcctccagcgatgtacgcactgtcaggtaaacaagccaggtcttccttctcctccctgtggtcatgagagtaacctgggatctgaaaatagggagcagtgagccttaaagtgtatcaatgttctgggatggtgggggaagtcagtgtgcagggaataatggagcagctgccctttggggaaacgcaagggattcatcaagagtagagaaagaatgttgagctttcaaccctagtttgttgataccattttagaatgtgtacctttcacatcttcctgtttccataggctaccttctgtcttcttgtctatttcctcagttacaccaatctgaagtttatggctacccaaattgcctctggcatgaagtacctttcctctcttaattttgttcaccgagatctggccacacgaaactgtttagtgggtaagaactacacaatcaagatagctgactttggaatgagcaggaacctgtacagtggtgactattaccggatccagggccgggcagtgctccctatccgctggatgtcttgggagagtatcttgctggtaagttctcagcattttaaagccctgtctaacaactggcttgtgggctcacatgcatgacacgtggagacaaacctgagacagcaggaggcaaactcaatagactgtagtattttctctgatttgaaattattttctttgtgtactaattcttattatttaatgcttgcctatttctgctaaaaaattaacacacataaaaatttagggagagaagttaaaaagtataagagatttattatctttgtttctctttatcatttctacctagtgattgttcttaatttaagatattaaaaaccttatcatttaaagaaatgttacctatacaaaatattttcttctccattagtttcataagcatgtttctcataattacatagactaattcctataattgtatttcaatacttttcaacatgttctttttaagttcatcattctttgctttataatttttatttgattcttgatattccataccataagtgagtaatttttcccaaatatctctattagaggtatattttctgtccatgcatacctgagactttttattgttgattttataaccactcagctgatttatagactcattagactatacacttttacttcctacaatgccatgtacatgttattttatcttttttcttgtgtgacattgcagagaaaagtctgagaccaatttggttttgttcatttatgattaatctgcttatttcctgctaatattcttataggatttgtaaattaattttgaaataaaaaatgtatagttattcccttgcactcaccaggataaccactatcaatactttggtatattttcttagaggatttttttctatacatatattttttctatgcatgcaattttttttctgtgcatgcatttatatacatatgtacatatatgtaatttatattacataattgggatgacactatgccatacaattctctatctctatttttaacttaacattttattatctgcataatattccatgtgtagatatatactataacttaataatgcctctataatttgatatttaagtactttccaatttcctgctattatgaatgatgctgtgatgtacacgtttacataaatccttataaagatctttttcacctatatatgtgaattgctatattttacccatttctaatgggatagttaggcattactctccctaaaggtattatatggtgttcaaaacaatatattagactgacattcagaggaccttggttcaaatccagtttttccactactaatggtcttattaaccagaagaatttgggaaacctctcctgtttcatttttctgatctaaaaaataaggataactggcatggtggtatgtacctgtagtcccagctactcaggaggctgaggcaggaggatgaaaatctgggctgcgctgcgctatgacaattgggtgtcctcactaagtctggcattaatatggtcacccctaggagcagtggaccaccaggttgcctaaagagggatgagccagcccaggtcagaaacagaggaggtcaaaactcccgtgttgatcagtaatgagatcaaacgtgtgactggccattgcactccaggctgggcaacataatgagaccccatttctcaaaggaaaaaatatttaataataaataatatcatccacttcacagtgtggttgtctgtattgagtagaaaatgtgagtagtcaatgcatgctatttacacctgaatctcattgctgtcacttgttaaagtctatctttcaacactgtgattatcactgaactggtaaatgagagtcctggattcactgcaggcacttaaactagattcctctatctctaccataaaaaccattgacttcccattcagattttgcctttctcaggagcattttcccaaggctaccctagagttgaaaggttgacctaacactcagttgcagagtcaaatagcttatggctgcatttttttcagctcttggatctcatccccagagaaacagaaccaagctgagatcatgagaatgaaagaatgggctgtttctaaatactccatgcacatcttggcattttcagaattccttgcctgtggtgggggaaggggtatagctgcagattatgaaatttaacagggtgttgttgtgcacaggttattctgatttcccattcttttctttacttaaatagggcaagttcactacagcaagtgatgtgtgggcctttggggttactttgtgggagactttcaccttttgtcaagaacagccctattcccagctgtcagatgaacaggttattgagaatactggagagttcttccgagaccaagggaggcaggtaagaactgttggggatgaatggatgtggacctgtgtaccttgaaggatggagaatggcaagtcctgacttagcaggagtgggccgagatggaagacagactatccaggtgttagtctttgtcactaactatccagatgatgtgaaagaccagtatcctccccaggcatccatacactttgctttatctatgtgtcaactcattgactcttggagagcataaagggtcatgtcaggtttctccccagctcaaaggtagcaggaaacaaagtcctatctctcatgatttatctatttcttgatctagaccatgtggtttttcttctgggtcaaaaaataaaagtgtaaaagggatgtattagcattcattaaaaatatagcttagtataagaaatggggttggttttgactatctagcaatgtttctagacttggatgtctgaaaatgggcagatatatcctaaacttgttgctcttggaaggcatctctgggcccagtattgtgacatctcaggactcagggaaagatgagttcccaagctccccaggagtctcaattcctagccaagatactccaagcttttttttgggtggcttagatttaaaattcctgtgagatctggaatttaaagcttgccagtaactacagcaccgcacttccccaaaggggcctggcaacagcatacccttggattatggtatctttaccaggaaaaggataatagctgggggaaggatcttgcagacaataaaaagtggatcttctgtggcttgaacagatccaagcaagccaaagatagataaggtattgacaagagataatacattatgcatattaaaaataagagaggggtctgagaatttaattgtatcttgatactctgtaaatattttggcagcagggagtctaaattagctatcttggttatgaggcaatttgccttcttactatagtcaaaggaaaatttactcctgagtacatgagataagtgagtgggccaaagaaaaatgttgttttctgcctctgccatgatcggctcagccaagatgaacttcaatatgggttgcccataaatggaagatttggtctctttttggttgtttcatcttttgcatgaaggtagggaccacataatggcccatcaaaaaattctgctgcagacaactgcagaagacaaatggaacagcttagaaaagggctgatatgattcagaactttcacgagtaggaaaaatggacaccacacccatttcagttatcaagttcaagaaagtgggcagggggcaaatcaaaccatgatgcaaagatacttccctttcccccgtctttgtaatattctctctctctctctcttttgttttcctttatttttgttcccaaagacttacctccctcaaccagccatttgtcctgactctgtgtataagctgatgctcagctgctggagaagagatacgaagaaccgtccctcattccaagaaatccaccttctgctccttcaacaaggcgacgagtgatgctgtcagtgcctggccatgttcctacggctcaggtcctccctacaagacctaccactcacccatgcctatgccactccatctggacatttaatgaaactgagagacagaggcttgtttgctttgccctcttttcctggtcacccccactccctacccctgactcatatatacttttttttttttacattaaagaactaaaaaaggaaaaaaaaaagcctagggcagatacaatctagtaaaagaaaatctttgatataccaaagtgttggataacaaaggctagaaaattcagataatttataaaggttaactatacttgtgcttataaatgtgcagattctacaatatttttccatgtcattctaaaagaatcttcagaaagaaaaacttgaagaatactaatgtcttgggaaacatgagattaagtttagggaaaacacttgatagatgtggagaatctgaggactcagaattcagcaactaatcacaggtggttttctaatttggcctctggacatgtctcactgtttgtatttctctctcctgtcaaagtgaatgatatattcttgaaaacccccaatttcttgaaatgggtgttctgttcattcatgggcaggggtcaggattgaagttcatatatgaaacaactggggatgtagataggaaagaatgtctgctgcaagagtgtatgaagggggattgtcatttacaaaaaaaaaagtacctcatggatggaaggattcatgaatagataatggacataggaaaggaggtcaatggaggacacataacagacatgctatccaccatttatttgtgattttgtaagagggttctcttctttgtcttgttcagatattttcatgtgtgtgttttagtgagaatctgagtttttaatcagtaaagtctgatgttttgataacttgatgttttgatggtagactcttgagttcatcttgtccaaatcttctagcattttcaaggatgaagcctctgtgggatctttgggcttggggctgaatttctcaggcataaatacctaatggccttgtctaagagggaatagatctgttctgagtgtccccaaaaaagttgtcctaggaactgatgtggagaagttacagggagactgatttccattccttattggggaaaacgaagcactcagaacatacaaggataaatgggctgccaccagaggtgaggagtctcttgtcactggagaggttaagatagaggctcaagaacaatgcaaggaaaatggaggttttcaaacacaaagtggatggtggtatgagacaatgtttaatgtccttctaactccgagagtccttgattctggagaggcacaggatgaacatctgttgctactgctgagtatacacactcttgcctctgagatggcgtgaccagcagaaaagaaagctcagggctgtggcttcagaattcatggaaacagagccactgtcaagaaggaatctgctcagagcagattctgagttttcacactccacaaatcctcagatttagtgggaagctggaaaaaggaactcttaattccaattgaggagaaacaagaaaacattacaaatcagtttcccaagctgagaaggattagccttgaccccttgggtctgcctctgttgccctcaccagtttaccttctacaacagtttctcaggaacatgtgtatttccccattcagctttcagcattgctccacgccacagcataagcatagatcccaagtccacaggctccattttgcaggtcatcttctgatcctagcaaatgtcctttccccatagttgtcctatgcctttgggctttagtctatcccaggactaactgtggagaaatcattggtttgagagtcaagagagcattggtttgggagctttaatcctctttctgcttcacactaagtgtgtcatcttggctaaatcacttggtctttctgcattttgttttcttatttataggatgaggaaattagattaaatggttttgaggtcctttcttgttctgatatgtccagtactcactggaaaattggatctataactgatgggtttagtaatctgctcatttcttgctctgaaaattgtagtcagcaaaagagatcatggaagaaatcactgtaatggtagtaatagtaacacatgccatttgtattgtgccttaggtttaccaggtgtttccaaatacattagcatatttgatatgtgcaggactagataccttgggacctgccacactccactttcaagatatgtattagcttcattagaattaaagggacttgaactcaggacctgcagcctattctttatccacatgtctctggtagggctacatccagatcacaccatgacttcttatagagcaagagaaaataatattattatatcttcctttgcctaaaatctctccacttattcttttttatgattctgcaccagttcactgggttattctatgattccatatttttttttaaaaaaatcatatttaaaatgaacttacaatgtctgaattttcctggccttgagtcacagaagtaatatgtttcagatggctgcccaatatgtattatcatgtaatacatatctgtgtccttttctgggatgaggaaggcttcaacttctggcactgagaactttgtattacagacacaggtttagtttctagcttagtcatgcctttagagtttagtagcacaaatccatgcaacccaacagaatacatggtgagggcctagtatgtagaatttgaaagtagttcaaatttgaattagaagaatgaagctaggacttatttggaaaaggagatagaaaaaaaatgatcagaaactgtggggccttattacctttgcagtaagttatcttcttcatgatatatgtgaattattttatgtgcagattgtgttttgggattgtcagatctaaacttatattcttgctggctaatgtgctgatagccaggtctgaaacttgatgtgctatccagacacatatgatcagaaaagatctagagtgcaaagaggtgtctgaggagcaaaatgtggttttaatgttgtggaaagatcacttgcaagtatataagactgtataaagaagaggactgtgtgcaagtggggtgaaaaaaaaggatacgcgaatgtgcatatgactgaatagggaggaaggtcagggctagaaaggaggctacataaaaaggggcaatggagagtgcacaggaaagacacaggggaaggtcaagtcgagcaaggtagaaacaggagtagctagagccattgggaatccattttgaaacaagaaggagttttgaaagggaataggaaagtaagtgtcttgaagtaaaagataaatatggatggagaaagaagaaattctggatgatagagatgataaaaatatttattaagaaatgaagtcaggttcagtgtatgaaatggaaaggaatttttcagaattttaagaaaggggaagttcctcttggaaaagatatagcaaccatcggggaatgaccttttcatttcagaagtggatgaggaaggtggtgtgagcatcaggtatattctggaccatttcaagtgctggtgagaagaaaggaactctttgcctgaactgggcttggttttccaagtgctgctttggaaatgaagacccagagatgcagagcttatggtagttcataaatcttcatgttctattatctttcatctgccaataaagttcattttcaataatgtccaccattgctgtgcccagaataaccacaggcaaacatcaaaacaatacgcataagttagacaagattaaatcttgtctgatatctgcacaaacagatatgcaccatgttggaaacatgtgttttcctagtcccatccaggcttcccacaagaaagccatgatgtgggtctaaaccatatgttttgagtaaaggagaatagaagaaggggagtgtccgcaaaatggaaagagatgaagatgttccaaggaagtatgctgaaacagaacagtgaatgttttgcccaaaactacaaaaataaaagaaaaaaagaaaattgcaatacatggctactaagtctttgatcataagtcgaatttatagacctggaatttgccatcctagtctttcctttttagtaagacttctgtcctctggcagtgcatatggtaggtctctaatgtttctgcatctccaggaagatgcagatccttatttttgctgggaaatccttctaaatagaaatgtaacatttttataaaaacagattaatgtgtttttcacttagtaaatgttttcaagagctgaattgagaaggaaagagactggagtggttaatggtgatttgatttctggcattctgagttttctgctacaattagctgcattacttggtgccaaagagcagtggggaattgttgagttgctgtatcctttaaaaaaaaacaaaaaacttgttattttgaaagaacttaaggctcacaagatgttacaaaaatagtagagtggccttaccctagatccagttttccccatttataacatttcacttagtccattttcggaaccagaaaattaacattggcataatgctattaactaaactacagaccttttttcaatttcgccagtttttccacacatattcatttagttgctggatacttttaattcttgctgatttgtaaactggccttgcttggatacaacaggaaagatactatctggataaagttctacagttttagagagactattaacacactaatgtgttcctttgtcatgagcaataccctgcctacactgcttctaaattttctgatttgtttggctgtttggcatctgaaacaatccaagacaaacttagaaagattaggcaacacaaaacacagtaagacctgttcatagcttgttgcctagaaaaccaggtagcaggatattctagatgcttcctgctgcttctacgtgagtaggattagcactggggacaaaataaggagtttagagtaaaccagtatttcagtcaagagttagttggcacttagttaatggcactggaaatagcttgtggagagaacagaatacaatggtatagactcctaatgtttgataaaatactattttcagcgtggtagagaggttttatttgcctaaatagctgttattaaatggaataacaaccacattagaccaaattaattgcaaacacagcggcaacctggggagaagttgaaactccagttttgtggattacagttttgagttttatgattgacatttttaagtcccctatttaaggggtcaagattataacaatgtgtgtcttattaagtctccaggtcattgtgagcacttaataaatatttgctgaatgttgtttttttgaatgaacataagatagaaacaaaaacttctcatccaattaactagagtgaacgtagggagaattgttttgctgtaacatggagagtttattttcaaatgaggaaagagaaaaaattactcagacttgttcctggtgaagtgcattctctgtttgtatactttttgatggagaaattgatctatagaactgcttaattttttgaggcatttagacagcaatgaaaggtagttctccacaggacaccgaatcaaaaggagagaccagactctggcctcatacccagcctatttgaaacaagctatctagtttctcctgcagacaccttgtcaacaacatgcaacagtgtcaggtgccttgcaggaaaataatctgagtcccaagctagcctgtgctcatccacaatcacaatgaacatgtcaaggaagaatttgcagagactcaagggaagcacaatgggataaggtaatcactttcagtgaaaaactgttttcttgaaaacaggcttggacacaattgaaagctggcttcctgcaaacacaccaagagtctgtaatctagcctatccattatatgtcctttattattcatgatatcctattcttctaccttgttgcctggtaactttttctgaggactgagtttctgcagcgatgtggtgcactcttcctgtgatgaggaaacatctgggcccccttctgcaggctttggaagatgatgtgtcttgtcaaggggtaaagggcaaatggatttaatttctgcttaaaactatcatagacgttccaaatagaatatgtaaaatttctctgtattagaaaaagaaacgtgataccaattgtatattttcttttctttatttattctctgtaagtctgtcagatgataaattgtaaataacaatgattaaagagtcatgctactgatggatctccctttctgtataaacagtgccagttctgggctttgtaacctttgctctttatagtcttatcattcctggggaagtgatggggcatgggcccagagctggggtgtatgtggtatggacacctgtttgtggggctttccagcaaaggattatttaaatagacctctaacatatgagttgactgtttattgggaagaaagcatcttggtctctgacatatccaaacatacgagacactgggattttacgtcctcacattaattagtccagttctggggaatccagtctagaattaactggtgatcccttatcgttatggttacagacttgtcttgtttgatacacagaaatcctttttaaatccaaatatagtctgtctcagactacctgcacatgcacaaaccaaaaaaaactatgaaaaccagaatttagactcagtcattatactagagattagaatgaaacgaccccaaacaacccatttcttacctggtctctgagaataagtttatacttttagttttctgagaatatttctcagaatatgtgagttttctgagcacatttttcagcatggggtatggtagataaatcacagggccaaggtttggcagggatagatgggatcattgtgtaccctattgttcttctgatttccaggagaacagaatgagcccatgcaaaacataaacttatgatgattaaaaaaaacacacctatccattcactcatcaataaaaacatattatgatggttatcaagctgtgtcctatgagtgataaaatatttgtaaaatataaaattaaatggcatctattgtgaactctattctagtctctctgagcacctctagcagttcagcccatctttcaaaagtcataacaccttgaaagcagcaactttagtgcagaaaaaggaagaagagagcagtttcatcacttggcttgaatgaaaatcttggggaaaggagagacagacggtcttgctctgaagctgtctggacttcacttaattcagtctgtcttaggctggcggtcatcccgagactgcggtaatgctgagcctccacagcccaggccctctcccttctttatagaaatgatttttttatgggacagccacacaaccaggtcttcttcttattccttatcacctctgagctctagaacattttaaaatgagtctttgggtctagactctcacaattaggcttaattttactccatgnnnnnnnnnnnnnnnnnnnnnnnnnnnnnnnnnnnnnnnnnnnnnnnnnnnnnnnnnnnnnnnnnnnnnnnnnnnnnnnnnnnnnnnnnnnnnnnnnnnnnnnnnnnnnnnnnnnnnnnnnnnnnnnnnnnnnnnnnnnnnnnnnnnnnnnnnnnnnnnnnnnnnnnnnnnnnnnnnnnnnnnnnnnnnnnnnnnnnnnnnnnnnnnnnnnnnnnnnnnnnnnnnnnnnnnnnnnnnnnnnnnnnnnnnnnnnnnnnnnnnnnnnnnnnnnnnnnnnnnnnnnnnnnnnnnnnnnnnnnnnnnnnnnnnnnnnnnnnnnnnnnnnnnnnnnnnnnnnnnnnnnnnnnnnnnnnnnnnnnnnnnnnnnnnnnnnnnnnnnnnnnnnnnnnnnnnnnnnnnnnnnnnnnnnnnnnnnnnnnnnnnnnnnnnnnnnnnnnnnnnnnnnnnnnnnnnnnnnnnnnnnnnnnnnnnnnnnnnnnnnnnnnnnnnnnnnnnnnnnnnnnnnnnnnnnnnnnnnnnnnnnnnnnnnnnnnnnnnnnnnnnnnnnnnnnnnnnnnnnnnnnnnnnnnnnnnnnnnnnnnnnnnnnnnnnnnnnnnnnnnnnnnnnnnnnnnnnnnnnnnnnnnnnnnnnnnnnnnnnnnnnnnnnnnnnnnnnnnnnnnnnnnnnnnnnnnnnnnnnnnnnnnnnnnnnnnnnnnnnnnnnnnnnnnnnnnnnnnnnnnnnnnnnnnnnnnnnnnnnnnnnnnnnnnnnnnnnnnnnnnnnnnnnnnnnnnnnnnnnnnnnnnnnnnnnnnnnnnnnnnnnnnnnnnnnnnnnnnnnnnnnnnnnnnnnnnnnnnnnnnnnnnnnnnnnnnnnnnnnnnnnnnnnnnnnnnnnnnnnnnnnnnnnnnnnnnnnnnnnnnnnnnnnnnnnnnnnnnnnnnnnnnnnnnnnnnnnnnnnnnnnnnnnnnnnnnnnnnnnnnnnnnnnnnnnnnnnnnnnnnnnnnnnnnnnnnnnnnnnnnnnnnnnnnnnnnnnnnnnnnnnnnnnnnnnnnnnnnnnnnnnnnnnnnnnnnnnnnnnnnnnnnnnnnnnnnnnnnnnnnnnnnnnnnnnnnnnnnnnnnnnnnnnnnnnnnnnnnnnnnnnnnnnnnnnnnnnnnnnnnnnnnnnnnnnnnnnnnnnnnnnnnnnnnnnnnnnnnnnnnnnnnnnnnnnnnnnnnnnnnnnnnnnnnnnnnnnnnnnnnnnnnnnnnnnnnnnnnnnnnnnnnnnnnnnnnnnnnnnnnnnnnnnnnnnnnnnnnnnnnnnnnnnnnnnnnnnnnnnnnnnnnnnnnnnnnnnnnnnnnnnnnnnnnnnnnnnnnnnnnnnnnnnnnnnnnnnnnnnnnnnnnnnnnnnnnnnnnnnnnnnnnnnnnnnnnnnnnnnnnnnnnnnnnnnnnnnnnnnnnnnnnnnnnnnnnnnnnnnnnnnnnnnnnnnnnnnnnnnnnnnnnnnnnnnnnnnnnnnnnnnnnnnnnnnnnnnnnnnnnnnnnnnnnnnnnnnnnnnnnnnnnnnnnnnnnnnnnnnnnnnnnnnnnnnnnnnnnnnnnnnnnnnnnnnnnnnnnnnnnnnnnnnnnnnnnnnnnnnnnnnnnnnnnnnnnnnnnnnnnnnnnnnnnnnnnnnnnnnnnnnnnnnnnnnnnnnnnnnnnnnnnnnnnnnnnnnnnnnnnnnnnnnnnnnnnnnnnnnnnnnnnnnnnnnnnnnnnnnnnnnnnnnnnnnnnnnnnnnnnnnnnnnnnnnnnnnnnnnnnnnnnnnnnnnnnnnnnnnnnnnnnnnnnnnnnnnnnnnnnnnnnnnnnnnnnnnnnnnnnnnnnnnnnnnnnnnnnnnnnnnnnnnnnnnnnnnnnnnnnnnnnnnnnnnnnnnnnnnnnnnnnnnnnnnnnnnnnnnnnnnnnnnnnnnnnnnnnnnnnnnnnnnnnnnnnnnnnnnnnnnnnnnnnnnnnnnnnnnnnnnnnnnnnnnnnnnnnnnnnnnnnnnnnnnnnnnnnnnnnnnnnnnnnnnnnnnnnnnnnnnnnnnnnnnnnnnnnnnnnnnnnnnnnnnnnnnnnnnnnnnnnnnnnnnnnnnnnnnnnnnnnnnnnnnnnnnnnnnnnnnnnnnnnnnnnnnnnnnnnnnnnnnnnnnnnnnnnnnnnnnnnnnnnnnnnnnnnnnnnnnnnnnnnnnnnnnnnnnnnnnnnnnnnnnnnnnnnnnnnnnnnnnnnnnnnnnnnnnnnnnnnnnnnnnnnnnnnnnnnnnnnnnnnnnnnnnnnnnnnnnnnnnnnnnnnnnnnnnnnnnnnnnnnnnnnnnnnnnnnnnnnnnnnnnnnnnnnnnnnnnnnnnnnnnnnnnnnnnnnnnnnnnnnnnnnnnnnnnnnnnnnnnnnnnnnnnnnnnnnnnnnnnnnnnnnnnnnnnnnnnnnnnnnnnnnnnnnnnnnnnnnnnnnnnnnnnnnnnnnnnnnnnnnnnnnnnnnnnnnnnnnnnnnnnnnnnnnnnnnnnnnnnnnnnnnnnnnnnnnnnnnnnnnnnnnnnnnnnnnnnnnnnnnnnnnnnnnnnnnnnnnnnnnnnnnnnnnnnnnnnnnnnnnnnnnnnnnnnnnnnnnnnnnnnnnnnnnnnnnnnnnnnnnnnnnnnnnnnnnnnnnnnnnnnnnnnnnnnnnnnnnnnnnnnnnnnnnnnnnnnnnnnn

SEQ ID NO: 1184 - DNA, 3142 bp, Homo sapiens
catcttgcatcagcctgtggatgtatgcctaccaccgggctccttcaccagcaaagtggaaaaagaagcgtttcacaacaaattcttctttttgggttggggaaacgcagtggattatagctctgttttcttctttccaaaactgtgcacccctggatgaaacctccatcaagggagacctacaagttgcctggggttcagtgctctagaaagttccaaggtttgtggcttgaattattctaaagaagctgaaataattgaagagaagcagaggccagctgtttttgaggatcctgctccacagagaatgctctgcacccgttgatactccagttccaacaccatcttctgagatgatcctgattcccagaatgctcttggtgctgttcctgctgctgcctatcttgagttctgcaaaagctcaggttaatccagctatatgccgctatcctctgggcatgtcaggaggccagattccagatgaggacatcacagcttccagtcagtggtcagagtccacagctgccaaatatggaaggctggactcagaagaaggggatggagcctggtgccctgagattccagtggaacctgatgacctgaaggagtttctgcagattgacttgcacaccctccattttatcactctggtggggacccaggggcgccatgcaggaggtcatggcatcgagtttgcccccatgtacaagatcaattacagtcgggatggcactcgctggatctcttggcggaaccgtcatgggaaacaggtgctggatggaaatagtaacccctatgacattttcctaaaggacttggagccgcccattgtagccagatttgtccggttcattccagtcaccgaccactccatgaatgtgtgtatgagagtggagctttacggctgtgtctggctagatggcttggtgtcttacaatgctccagctgggcagcagtttgtactccctggaggttccatcatttatctgaatgattctgtctatgatggagctgttggatacagcatgacagaagggctaggccaattgaccgatggtgtgtctggcctggacgatttcacccagacccatgaataccacgtgtggcccggctatgactatgtgggctggcggaacgagagtgccaccaatggctacattgagatcatgtttgaatttgaccgcatcaggaatttcactaccatgaaggtccactgcaacaacatgtttgctaaaggtgtgaagatctttaaggaggtacagtgctacttccgctctgaagccagtgagtgggaacctaatgccatttccttcccccttgtcctggatgacgtcaaccccagtgctcggtttgtcacggtgcctctccaccaccgaatggccagtgccatcaagtgtcaataccattttgcagatacctggatgatgttcagtgagatcaccttccaatcagatgctgcaatgtacaacaactctgaagccctgcccacctctcctatggcacccacaacctatgatccaatgcttaaagttgatgacagcaacactcggatcctgattggctgcttggtggccatcatctttatcctcctggccatcattgtcatcatcctctggaggcagttctggcagaaaatgctggagaaggcttctcggaggatgctggatgatgaaatgacagtcagcctttccctgccaagtgattctagcatgttcaacaataaccgctcctcatcacctagtgaacaagggtccaactcgacttacgatcgcatctttccccttcgccctgactaccaggagccatccaggctgatacgaaaactcccagaatttgctccaggggaggaggagtcaggctgcagcggtgttgtgaagccagtccagcccagtggccctgagggggtgccccactatgcagaggctgacatagtgaacctccaaggagtgacaggaggcaacacatactcagtgcctgccgtcaccatggacctgctctcaggaaaagatgtggctgtggaggagttccccaggaaactcctaactttcaaagagaagctgggagaaggacagtttggggaggttcatctctgtgaagtggagggaatggaaaaattcaaagacaaagattttgccctagatgtcagtgccaaccagcctgtcctggtggctgtgaaaatgctccgagcagatgccaacaagaatgccaggaatgattttcttaaggagataaagatcatgtctcggctcaaggacccaaacatcatccatctattagctgtgtgtatcactgatgaccctctctgtatgatcactgaatacatggagaatggagatctcaatcagtttctttcccgccacgagccccctaattcttcctccagcgatgtacgcactgtcagttacaccaatctgaagtttatggctacccaaattgcctctggcatgaagtacctttcctctcttaattttgttcaccgagatctggccacacgaaactgtttagtgggtaagaactacacaatcaagatagctgactttggaatgagcaggaacctgtacagtggtgactattaccggatccagggccgggcagtgctccctatccgctggatgtcttgggagagtatcttgctgggcaagttcactacagcaagtgatgtgtgggcctttggggttactttgtgggagactttcaccttttgtcaagaacagccctattcccagctgtcagatgaacaggttattgagaatactggagagttcttccgagaccaagggaggcagacttacctccctcaaccagccatttgtcctgactctgtgtataagctgatgctcagctgctggagaagagatacgaagaaccgtccctcattccaagaaatccaccttctgctccttcaacaaggcgacgagtgatgctgtcagtgcctggccatgttcctacggctcaggtcctccctacaagacctaccactcacccatgcctatgccactccatctggacatttaatgaaactgagagacagaggcttgtttgctttgccctcttttcctggtcacccccactccctacccctgactcatatatacttttttttttttacattaaagaactaaaaaaggaaaaaaaaaagcct

SEQ ID NO: 1185 - protein, 855 aa, Homo sapiens
MILIPRMLLVLFLLLPILSSAKAQVNPAICRYPLGMSGGQIPDEDITASSQWSESTAAKYGRLDSEEGDGAWCPEIPVEPDDLKEFLQIDLHTLHFITLVGTQGRHAGGHGIEFAPMYKINYSRDGTRWISWRNRHGKQVLDGNSNPYDIFLKDLEPPIVARFVRFIPVTDHSMNVCMRVELYGCVWLDGLVSYNAPAGQQFVLPGGSIIYLNDSVYDGAVGYSMTEGLGQLTDGVSGLDDFTQTHEYHVWPGYDYVGWRNESATNGYIEIMFEFDRIRNFTTMKVHCNNMFAKGVKIFKEVQCYFRSEASEWEPNAISFPLVLDDVNPSARFVTVPLHHRMASAIKCQYHFADTWMMFSEITFQSDAAMYNNSEALPTSPMAPTTYDPMLKVDDSNTRILIGCLVAIIFILLAIIVIILWRQFWQKMLEKASRRMLDDEMTVSLSLPSDSSMFNNNRSSSPSEQGSNSTYDRIFPLRPDYQEPSRLIRKLPEFAPGEEESGCSGVVKPVQPSGPEGVPHYAEADIVNLQGVTGGNTYSVPAVTMDLLSGKDVAVEEFPRKLLTFKEKLGEGQFGEVHLCEVEGMEKFKDKDFALDVSANQPVLVAVKMLRADANKNARNDFLKEIKIMSRLKDPNIIHLLAVCITDDPLCMITEYMENGDLNQFLSRHEPPNSSSSDVRTVSYTNLKFMATQIASGMKYLSSLNFVHRDLATRNCLVGKNYTIKIADFGMSRNLYSGDYYRIQGRAVLPIRWMSWESILLGKFTTASDVWAFGVTLWETFTFCQEQPYSQLSDEQVIENTGEFFRDQGRQTYLPQPAICPDSVYKLMLSCWRRDTKNRPSFQEIHLLLLQQGDE

SEQ ID NO: 1186 - DNA, 35425 bp, Mus musculus
  misc_feature (1)...(35425): n = A,T,C or G
ctggcagcttatcaagttgaccagggtagccaaagtgctgtaccagactggttcacagggacagtgagaacacctgtgcctagaattcatggacggcatcaaacgttatgttttctgtaactctaaaggttcagtgtggcaggagagggtgaggtgctcagtctactggagttggaaagcagtctcgagatgcacgaaacttgcttgcaaggtcccggacatccaccatttggtccgtgggatgatctgcaacagttaaataaagcttttggagagaggggaggaggaggaggaggagaagagagaaagggagtggaaagcagagaaaaacgattattcagtgagggcacactgggaagaggaacatcctagccggggtttctatttccagtgctgacacaaaatgactagaagcaacttcaggagaaaagggtttatcttgtcttacagcttgctgtccaccatacagggaagcccagggtaagaactcaaggaaggaacctggagacaggagttgacgcagaggccatagaagagtgctgcttattggcttgcccagcctgctttcttatagcacccaggactaccagccctggggtggcactgcccacaaccagctgagccctcccacatcaatcaccagtcaagaaaatgtacgcttctctggaggcaagttcctcttctggctggcactaaaattttctctccctggtctacgattctgtgggaaattttaattctttggggtccattgctttaatagtatgataggtgcaaaagtgtcattgtagtctgtctttcgactaccagggtagttacagttagagtgagccaataagtctcatttgcacccacccctatctgacaaggaatatatattggacggccatcgcttcccaaagttcagagaagtggcactttgctcaaggttatgtgaaaccattgttgggccaaaaatcaaatttccttttttccctcccctgctccacttaggcaattagagataaacgttcctttgtagtttaagaccttcactatatcaaaggtcttggcttccttagaaataactgtctcttactccctcctcccttctcattagacctcttcagcctattgctgctctgaagaaaagaaacctatgaacaaatttacattctagagttaatgatccacaaaacctaggccatttgcatttctaaaaggttaccggagacctggtttccttggtgacattttaaggctagataggtgccactactgtctggatctagctgagatctctcaaaccagagcctctctaactcagccgcctctgtgattccgtctttgtggttgctctgccttcccctggagtcggcttctgcctgtagtgtttagggagatgcagtccagtggtggtaaccaagaaaccctaaagggggctgataaagaaatatcacagggatccactgaaatggtggtcagggtgttaagaggaagagaaagaaaactcaaccaagaagaaagaacacacagagaagatgcaggatctgagaaccacctaggtttacaacactcatctaccctgttcaatttgaggctataaacacagttgctactgaaagcagcaaactagattgttctagtctttaattacagtactttttttttcttttttaaagatttacttattttatttatatgagtacactgtagctatcttcagacacactagaggagggcatcagatctcattgcagatggttgtgagtcaccatgtggctgctggaaattgaactcaggacctctggaagagcagtcagtgctcttaactgatgagccatcaatccagcccccaatgacagtactaaaaagaatttatgacaatgtcttagttagggttttattgctgtgaagagaaactatgatcatggcaactcttataaaggaaacatttaattggggttggcttacattttcagaagtttagtccattatcatcacagcaggaagcactgcagtgtgcaggcaaacgtggtgctggagaagaagctaagagttctacatcttgatccacaggcagcagaaggaaacggagtgcctgccatactgggcatagcttgagcatagcagacctcaaagcctaccgtgccacagtgacacacttcctccaacaaggccacacatacttcaataaagtcattccctgtgggccaagaatgcaaacacatgagtctatggggaccatacctgttcaaaccactacagtcaacttttaagtgaacctttattcatgagtttacttattaatcttcacaacataagtacagttaaacaaaaggaagcaagaaagagggaggaagggagggacagagggagagagggacggagggagggagggagggagggagggaggggagagagaggggggcaaaggctagagcagaagtctctttggggagaatcagccttcattcacctctggatcaacctccataaggtgtctcggactgatccccaaaagaaaggaaaagtctgactttttgtaaagttttggagagggtgggaaacttcatacaacatgatttagttttccatcgagcttgtgacaaaatgaggaggagcccaagtagcgtgaattgaaagctgccacatcacagcacggagtgctgcttaccactgttccagagagagcagcagagaggcccagcctgattcaggcctggtaacagtgcagacttgtgttttaacactaagaaaaaaaatctccatttcacagagcttgaaaacaatgaagaatatatgtgggactgcatgtctgtaaaagggtcaggctttggatctgggtctgtctctgaaacctgtggtccttggttgttactcttgtttgtttgctttaatttctgaggtaaggtctttctatgtggtccagagtagccttacgtcatccacgtcttcactgaagccaccattctcctgcctcagtctcctgagtgctgagattacaggtgtaatcctaccaccatagtcattttgttctttgtcagcggacttttgatttttcttacagatcttttccaagactagaaatacacacttcctatcacatgttccttttgaagaaatttcctttccagctggcatatttcagttttcagttgtgtgttcctatgtttgcaatcatttcttttacaagcatctcctatgttgtcccttccagctgcatcaggaaagagtctccgggtttggcttcagcttagtgtttctggaaatgccctacctggttttgttactttctcacttgatagtttttccaaaagatattgtcttgatctgccatctcagtgaaatggttgggtctgagaaaactcagtgtgcaaacctttctgaccctcttcacatctgagtgctcagagaaaaccacacatgcagtataaacaaatgaggctgctcgaagctgccacaaccatgccaacaggcatggagcttcagggacactagctagagttgtctggaagttattgaaaaaatacctccacaagatccagctttaaggcattttcttagtggttggttggggaggtcccagcccattttgggtagggccacccctgggctggagattctgggtcctataagtaaatcagtacacagcactcctccctggcctctgcatcagctcctgcctccaggttcctgccctgtttgaattcatgacctaacttccttcaatgaagaacagcatatggaagtgtaaggcaaatacatccttctctccccaacttgctttttggtcattgtcttagggttttactgctgtgaacagacaccataactaaagcaacttttaaaaagaacatttaattggggctggcttacaggttcagaggttcagtccattattatcaaggtaggagcatggcagggtccaggtaggcatggtgcaggaggagctgagagttctacatcttcatatgaaggttgctagcagaatgctggcttccaggaaactagaatgagagatttataacccacacccacagtgacacacctactcaaacacggccacaccttctaatagtggcactccctggctaagcacatacaaaccatcacattctactccctggtccccatagacttgttcaaacatatgagtatatggggaccatacctaaacatagcataatgcaaaatacatttagtccaatttccaaagtccccataggctatagcagtcccaataatgttaaaagtccaaagttcaaagtctcttctgagattcatcaaatcacttaactgttatcctcaaagcaagacaggaaaccagctaggcaaagtccaaactctgtttctcaaaggctgatgttaacgcattcttcagatctccaactcctttttcatctttgttgactacaacaaacttctttctcttgggctggttccactccctattagctgctttcctcggcagataaccaatggctctggcatctcaaacatcttgaggtctccaaagcaacttcaatgttacaacttcttgtttcaatgtcggggatccacacatgatcttctggtctccttcaaagggttggtgtcacttcctcacctctgccctctatagcactgtaggctcaggttgatctactccactgctgctattcttggtgatcatcccacggtactggcatctccaatacactgtggtcttctgctgcacttaggctttatcaatagcctcttatagactttcttcatggtgccaagcctcaactcaaggtgatcatcccacggtactggcatctccaatacactgtggtcttctgctgcacttaggctttatcaatagcctcttatagactctcttcatggtgccaagcctcaactcctttgcatgaccccttcagtcctgggccatcaactgcaactgaggctgcaccttcacgaatgggcttccatggccactaacagtgccaatcctcagctgttattcatgtccccctcatgccttcaaaaccagtgccagctgggtgattcttacacattaccaagtacagctgcagtgcaaggtataaccttggccatctctggaacacaggttctttgtggtctcataaaacacttctcagaagatttcacctcagtgatgctggcttcttcttaatcaccagtaatttcttagctccagctaaccagcatcaattgtcttttcctcttaaatataaagtcagagacatttgtccaaggctgctaagttctgctgcttgcagaagctggaacatggcccctttgttctattacattatcattaccctcctcttttccaaccccttcactacctaagcttggctgtcctggatcttgctctgtagattgaccttgaactcatagatctgcatgcttgtctcctgggattgacggtgtgtaccaccatgcctggatttaagctttcttcacctagaacttgctctgtctcaggctggccttgaactcacagatctgcttggctttgtttcctgggactaaagacaccactatgcgggatctaaacttaactgggtaggatcttgccccaaatcccactcccttaattcagtgtaatatccttgaacacaggattcagctccatttcacttcttggtgcctctttaatactcaaaccacccctttctcagcttgctatgcttgtttaaaatgctctttatgcgacttaactagagaagtctatggtgggcgtttctgagacttcttttgtcagtgcaataaatccgagtctcttcacctcagactcaggcacactcttcagacaagtgcaaaaattagccacatttttttccaccaaaataccacaaaaacagtctctaggccacgtactgaaattattctccactgaaacctcttgagccaggtctgcccaattcaaatcgcccacagcaacaaagtcttccatattcctactaggatggcccattaagtcccacttaaagcattccactacttttcaaatccaaagtcccaacatccatattcttcaaaacaaaagcatggtcaggcctatcacagcaataccccagtccctggaaccaacttcttagttagggttttactgctgtgaaccctatgaccaaggcaagtcttaaaaggaacacttaattggggttggcttacacgttcagaggctcagtcaattatcatcaaggcaggaacatggcagggtccaggcaggcatggtgcaggaggagttgagaattctacattttcatcaggaggctgctagcagaacactggcttccaggcagctagaatgagagacttataacccacacccatctactccaacagggccacaccttctaatcatgccgctccctgggctgagcttatacaaactaccatcatcttggtgttttgttgcatctatagaaaccctaatgaagatcgagtcagtgcgagagttcacaaacacagactcaaaggttcccgaagagtttggaaagctgactgaacactatagtcagcacaaagctttaatactcaacacactggctttgtgctctgactctgtcccttagggtcatctagcctagaacgaactattttagcttctttgaagtgaagtttcttcctgtgcaaattgagcatgacctgggattgctgtaatcaggtaagtctagagcctgcttcacagttagttagcatctctatgtttacataattacattttgtttcttagtatggtaactatatactgttcttatgtttccttgtcttttggtcttttaaaaggggtatagtttttttaatgtcccaaaggaaaaaaagtcaaagtttggggggcagcatatcacactggagtgtgacttcactgatccaacatgactgagaaacttactcatctttttttttcccccagatggacacattttatattattattattacttttaaactttttaatggttctgtgagttttgcagcacacaccccagtcccactcattttcccatcctctagtatctactctctgcccttgtaacctccctcaataaaaatacacaaacaaacaaaacaaaacaaaacaaaacaaagcatagaaacctctcacagaggaagctgtggtgtgccacagtgtgtctgtcccacaatatacctctttgtccacacatcttcacttgcaaatgttcactgcagtgagtcattggtctggtctgaggtctctggcttctgtgacaccatcagtactggatccttaccgcgactccgccttgttatcctgttgttgccctgtgtcatggagatcctgcagctttggatcagcaggaccagcccttttgcaagtgcccagcaattcacagttcacagtgaggggtggggccggttctgcacatcacctgggtagctggtggctgcccagaccccaggacaacctcatggtctctagtggcaatatgagccaccgatactgacatcgacccctgccactgcttagccacggatccagatccaggtcctcagcaatagcatgggcggggacgtcatcatggcctcaggtagggggtctggctattccacaacaggctttgcctctcttccctctagtctccagttccatcttccttcacagtactcaaatgactctacttctctttctctcccatctgtgcactacacacttgcacattgtagtggctcccactccaggcagggcatgtggctggagagcctctgggtgacctctgcctgcacagcgtggcatggcttggtctatagcctctcctaaggcatggcagcagagggtctatggctggttccccccctccccccttctgtaccacgtagcatggagtcaggcaagcttctgtgtgactacggctgggtgcctgaaaggaacgctggggctgtgtgggaggggtggcaagagaagaatgagaccaagacaaagtttctgatcaaggcccgatgtttcctttttgaatctgaactctaaaaggggggaagcccatctcctactatgccaggatctcgtggcttgtcaggaactcacaagctcagcctctcagcaggtagtggcatcttggaagaagctgcagatatggcagggcaatagtctttacctaggtcggaagactccacccgaggtggaatagccggctgtagcataaacaaggtctaaatcagcctctcaaggctaggggaaggcacacagagccttcacacagagtagcagcaggcaggtctgaggatatcttccttctctcacgctgttcaggctgatcatcatggcggcaggcaggactctgtctgcagcctgtctgggctttgtggtagagagcagatctcggggtctttccctgccaagcaccagaactgggtggcatggtggttggcaggtctctggatgtctcccgggtttacttttaacctctactgccatcagcacagtcctgggtgacactgcgatgacctccttgtcactgacctccgcacagcaatcaatggtcccagtcggaggtaaatcaggatgctctctattctaatgatatatttaaagtactgatgtcatcccattgctctcttcccataggttaaaattcagataagagctggcaggggcggggctgggagatgagatggcacctgtagtaaagtcatagggtagatagggtggaactgttgaaggtttctgaagaccacagagtgtaagatggttttataatgtcatttcctttactattacagcatgcttcctgacagagcattttggaaagaggcctcagaagagctccccaaaactggtccccaaaattgcatcatctggggatgctgacaggaagcaagaaaaacaaaaataggatccatccgtgatacattcatagtccttttttttttccccaaaaaacctcgagtacagttgattctttaccagtgacagttttaaccaccttgtttgggaggaatgtttactaaagccttaagtctcttttttttcacgaccaagagagattttctgcgacctagtgggtagcagcaggctgtgttgctaagcattctacagtgcacaggacaagccctcaccagagttatgtgacagccatcctggcactgcatacctgcaatctcagtatcctggagactgagggtggaagagctcaagcctgaggttaccctgggctaccctgggctacacagccggttccaggccagcctgcattatacaacaatacacttctttaaaaatgtttttctgctaaaaatgtcattgctgcagaatctgagaaactttgttcgaatgggtagaaatgttgatcttcattttacagaccagggagccagatgttctcagaagttctggtgcccacaacttgttcttacagcttggaaccctatgatcttttatcatgccatagcagtgagaagagtaagtagtgcagtggggcgggggagggattcaggactagggcacagaccgatgctcgataggtacttacagaggagcgagtggagaggaatgtatgtgaaggatgagtgttctactgctgttctcacatatggcctagcttttggtctacaatccaacagtgagctggggattgtgataacagagaaacccagatggtggtaagtggttgtgggtacctttattcagtttctggaggagtccagatcccacagactggaccttcaagactcttgccatcctccatcacagactgaggcaaatgacttctgagctgcgttggggtgaagttttccctctctgtaccagacgtccaggtcagctacggctccagcagaacatgaagggagttgtttctcagtgtctaaaaaattttctgtgatttgagctgaatccagtttattctggtaagtcctgagtcttctaatagagaacggatgaaaggaaagagggtggaaggggaggagcccaggattaaacagaccgtttcttttcacttccccatttggacttcacaattttgtctgttctctgggtactatctgccaagccgggagggaagcctgtgcctgcagctgactcgctccagagctgatgggaatcctgccgttcctactgatccccatggagagcaactggactgtccatgtgttctcacggactttgtgccatatgctactgtggacagccgtgctaagtaagtcgggacctccagaagagaggcaggggaaggacacctgggttggggttggatgaatcagcctggcataggaggcatgtcaggagtaagtaggaggctaatagttaaaatgtaacaacctggttggcctttgaaacaaaatcaaagctggcaggagtttttgctgtttcttcttttcctgtctcttggtaccaccttcccctcctctgatcaaaatctagagtcctagacttgagtgagcaattaaaagaccagtttctctttgaactcgtgattcacacaggaccaaatcttaggcaagatgtctagtactgcttaagacaagggctgggagaaagctcaaggatgcttttgaggggtggtggtggacactttattatataaggagaggtgctggagagatggctcagtggttaagagcaccgactgctcttctgaaggtcctgagttcaaattccagcaaccacatggtagctcacaaccatctgtaatgagatctgatgccctcttctgttgtgtctgaagacagctacagtgtactaacatataataataaataaagattaaaaaaaaaaaggagaggagtaggaaggtcaaggttgacctgggaacttgggttcagggtttcataaacatggacaagtctggcattgtcagttgtggggccagagaaatctctcatgcttccttcattgtgtagaccatgggacttggttctggccctgcttagtaagaaagtcatggtcagggtcttaggctgagatggaggaagactttctggtcctggtctcatctgtgggcagaggacagaaactgatggtgccaggtcattagcagagtctgggtgatgctcagtaagggagccctattccaggagcatcttctaagctcagttcctggggcatctacgcatacctctgagaagaaggcatactggtatccactcaccccaagttatgtggtatgactcatagtgaaatctggtcagcgctgagggacctcagctgtccaaatatatatttacacatacacagacacacacacacacaggtatatatatatgtatatatatatatatgtgtgtgtgtgtgtatgtatttatataaaatataatatatatatatttgataccagatagtttagttttcacatgggaagatcagtcctaaagaggcaatatgcctttctatttgtgctgtatagctatcaatcacttggtgaaaactcccaaggatgacattttcttccattttccttgggtacatctccattttcccccccatttttttttctgggcctccacacttaggtaggacatcctaacttccttcagttgtataataccctctgactttggtcctgagtagctatagaatcttccatccagctatggggaggcacggtgctttcgaagggcctttggtggaggcctgttatctcctgatgaagctccaggactgttctgcttctcccagttcccatttctcccacagtggatcgtcctcagccaggcaacgtgcccactgcacttggcttttactgcccgtgtttctgctgattcttaaagttgtttgcgccagacgctattctggatttgaggtcatatcagcaaacaaaactgttttcctgacctaaagtacaaggtctttgtcttccttatggggaacattagacacgaacagagttctcattactgtctcttgggtatagaatgaagcatgagtggtagtttccctcttctgcatctctttgttttttgtttttgctttgttttctctttttcatgcactgcacttgcccccttgccagtcctacatgctcaggggttttagcaattacttctccatcactagctcccagactcatttgtccttccttcctcggtatactttaatttctctgtctgttgatcagacacctatagatttatcagcatagacacaaatttatattcaaaattcaaaataacatcatttccttacatattttcttatctttgtaatatttctatctatatgagcaaagccaccttttccttggtcatccatttttatcaaccttatgtctcattagaagccaagtttcctcagtcttgtctcttagctttccctcacgtgtgtcttctttgcttcctattgtcaatgcagatgagtaagcaaggccacaagggaatatgggtacatttgatggagtcaaaggataaacaagttaaggggacctgcccacagtatctgagaagtaaaggcaggaagaactgtagttcaaagccaatatgggctacatgacaagtttgtagccagcctaggctacatgagactttgtctcaacaataataactacagcaagaaaaagataaagggatttgcaattaggtgatgataatgatgaatgggatgtgtgtgcatgcgtgtgtgtgtgtgtgtgcatgtgtgtgcaagtgcatgtgcgtgtgtgcatatgaaggtaaatgtggacttacgggtagacagcgatgatgaggtggtggtcagatgatcacagagactgtacttgggcaaatggaagagaagaggactggagggggattgtgatgaaacctcggatatttcattttgtggcctttgaagttggtgtggtttggagcggtgatggcaaggccttgaggtatagcatgggctgtgtggctaaactgtatgagagaatattcactacagatgaggaagtcatggcatgatgcagccagatgctgcacaggccactgacacatgttctagattaccggtaaccatctttttcttactaatctctgggacttcctctgtcccaattagtctgacacagcagtttcagctccaaagcaaacctctcattgtttactgagctaaacagcaaactttggaaatttgcctatgatcctttaaaaggtagccacgtggtatgtttggaacttcacagataccttatctggattgtcaccaatccttacaacaattatgtcgtaggtattgttgtcatcatctccatttataagccagggaatcaaggcagagaaaagtaaagttgtctctgcaaggtcactgagcatcagtcatattactttcttttctcattactttgtcaagacgccaggcaaaagcaacataagaaagggtttattttggcatatttttttagggcattgtggtgggaaggtgtggtggtaccttggctgaccaagtcacacccatagtcaggaaacagaggtggatgttagtacgtagctggctttcttctctactcttgtttattcgagccaggaccccagccctttggatggagacattcgtattcggagtgggtcttagcactatagctaaacttttccagaaacacctttgcagacacaatgagagatgtttccatggcgattctaaatctagtcaagctgataacataaactaaccaccaccgtggtaaagtcaacgtgtgaattttgtgtgcgttctcacttgctgctgttccagttggctttgacaatcctccagaatatggccgccacctccattttcgactgcgttcctcattatcggggtggtttttgtttctttgtttttaaacagaccaaagaagcattcaggctgcaacttgctgagagtgtttgcaagcatccgtccatctttcttggggaatattcctcttctgtttgtcactatgacagaacacttgcagctgcacgatgaatatttcctcactttctccgctagactaaacccagccaagtacagtgccccaagtcccttcctctgcagaacttcctagcctttgtccattctcttttataagatgtggtggcacaggactagggatgcagagcagggtagatctcgggaggagaaggccaacttggtcattctaggctagtcagggttatgtaatgagaccgtgtcaaaaccaaaagtggtttttttttttttttttgcacacatgcgtattcttatcatcagacttcagtgggggaacagagacttatatcttttcttttaggtatgctctgcaaggcacaaggtggtcaatgcagtctctaggaatacaaagagatgcattagcagggatttaagtgtacatcctgagatgtggggtgtggggatcagaatccagttttctagactgccagaagaatgctctttcacgaaacgccccctcctcttatccctgaaagtattcagacttggaaggctcttgcctttttcatctcaattgtaaaatcccatcatggacaggtgcataaacacacatgcatatgcacacacacatgcacatgtacatgcacacacacatgcacatacacatgcatgggcgctcatttatctcaagactacctttactatcatacccaacagtggtgccacatgtccatctttgtatttagcattcctgtcccatgtcccttcccctcaccatgtgccgttctatcggctcctgcaggaatcacagatctagtgtacttttctttcaatttaagttttagttttgtgaatgactgttttgcctgcatgtatgtctgtgcaccacatgtgtgcctggcgcctgaggagtccagacgaggatgtcagatccatgggaactggatggtcatgagacaccacgagggtgctgggaatcaacccaagtcctctgagagagcagcctatgcccttaaatgctgggccatctctctagccccatgatgtccttctgtaatttcttttttttttaattaggtattttcctcgtttacattttcaatgctatcccaaaaggtcccccatacccacccccccaatcccctacccacccactccccctttttggccctggcgttcccctgtactggggcatatgaagtttgcaagttcaatgagcctctctttgcagtgatggccgactaggccatcttttgatacatatgcagctagagtcaagagctctggggtactggttagttcatattgttgttccacctatagggttgcagaccccttcagctccttgggtactttctctagctcctccattgggagccgtgtgacccatccaatagctgactgtgagcattcacttctgtgtttgctaggccccggcatagcctcacaagagacagctatatctgggtcctttcagcaaaatcttgctagtgtatgcaatggtgtcagcatttggaagctgattatgggatggatccctgcatatggcaatcactagatggtccatcctttcgtcacagctccaaattttgtctctgtaactccttccatgggtgttttgttcccatttctaagaaagggtccacactttggtcttcgttcttcttgaatttcatgcgtttggcaagttgtatcttatattttgggtatcctaagtttctgggctaatatccacttatcagtgagtacatattgtgcgagttcctttgtgattgggttacctcactcaggatgataccctccaggtccatccatttgcctaggaatttcataaattcatttttccttctgtaatttttttaccctaccaaatttgcctagcagcaaaacctggaatacctaaatcctttttaaaaaaagatttatttatttattcatttatttaatttatttaatgtatgtgagtacactgtagctgtcttcagacacagtagaagagggcatcagatcccattacagatggttgtgagccaccatgtggttgctgggaattgaactcaagacctctggaagaacaattagtgctcttaaccagctgagccatctctccaacctgaagacccaaatcttaagcaatgggcatatgaaataaatcacaagaaagtcagttgtagggtagggcacaaatgctcaaatgacaataaacagactaagctattaggtcttgtattgcttagtgaaaagtcaggcgggagagcactcttctggtgtggtctctttgctctgtgtgtgtgtgtgtgtgtgtgtgtgtgtgtgtgtgtgtgttcatgagggaaattctaaggacatatatacccagtgataatattttgtcatgagtattttctatttgtcaacaaagatgatggactatccacaggatctgtagtccctcctcatgaaagaaaaaccctactcccaggatggaccttggcaaagtctgatgtactaaaccactaattctatgtaaacttcaaccggggccttagcagtcaaaggtgttcggccctttaaagtgtcacaacacacatgctaaggggaaggggcctaattatctctgaaagtgtgctttatccaggaagtcccagggaagggccaggccttgaagggtgggctgtgggagtgagttggggctctgggtctgggtaggcatgtctcagtacagaaggccctggttgatgcttacttcctttcttacagatcttgctgctgggactcatggtaagtcttctttttatatctcctcactctcttctttgtcaccgtctctttgtctgtctggagctgctctgaatggatcagcaaccgggctcagtatcaggtcaggaccaggaatggaccattgttctcagaagatgccctgcacttctccttctctctgcctgggaaggaagatgatcaaaagccatggctagctaggatatcaactcttttagtcctgttagagtgagatgtggccagttatcacaaactgtccttgttctcaactgcccttcactctcttagtaaaattgtttaaaaggttgacctcaaagaagcagggagtgaatgcccagagcctgaggaagtggaggagaggtaaggatgaagacaaagtggttaatgggcacaggggtcgagtttgatatgaggagtaacttctaatgtgctgtagcaagaaaggtgtcttagttagggtttctatttctgtgtagaggcaccatgattgcaacaacatttaattgaggagttccttacagttcagaggttcagtccattatcatcacagcaggaagcatggcagcatccaggcaggcatggtgctggaagggtagctgagtgttctacatctggatctgtaggcagcaggaagagagagtggcactgggcctggcttgagcatctgaaacctcaaagccaacccagcgacccacttcctccaaaaggccacacctactccaacaaggccacacctcttaatagtgccactccctataaggggccattttcattcaaatcatcacaaaggccttttcccaattgaggctccctcctttcagataactctaatttgtatgtcaagtttatgatactagccagcacagagctccatgccctgttcttctgattagagaaccatctgcaactgggggtggggtaggggggagtgacaggagggatggagaagagaaatggaaatatatcttggtgagagatatttctggggtgtctcctttgccccctcctatcttctcttgctttaccctgctgaggatcaattacactccttgtgatttccctggggctcacaggatggaataagtagaagaattcaatggaagaagcttcctgggcctggtcccacccttggtgctctcagtaggaatgctggtgtctttttagcagaaacttggggcctgctgaggttcttggggcttccttgcctcacactgcctgctctctccaaaattgagcagatcttccaaaggctgtggtcaaactcgagcccccgtggatccaggtgctcaaggaagacacggtgacactgacatgcgaagggacccacaaccctgggaactcttctacccagtggttccacaatgggaggtccatccggagccaggtccaagccagctacacgtttaaggccacagtcaatgacagtggagaatatcggtgtcaaatggagcagacccgcctcagcgaccctgtagatctgggagtgatttctggttagtaaaggctggccctgggaggagatgggataccaagaagttgggggtggagtggggtggatctgcttactgcaaagtttgcaggaaatggggtgggctggtttctgggaagcatcccagggagctgcttcaagggctttttgtccacccgtttccgcttttgccagcccctgtgctcagcctgcagtggagggcacacaaattcctgagaaactgtgtgaacagtttgttgtggtagtcctggttgagcaagagagttcaagggcacgggcagctgaatgtggcagaaaaaggaagtccctatttcatagaaacccttctagttcatgacacccagaaaaatgccaatagtatgcaactgaatccaagccctggggaagaactgtgtatacaaagctgactgatgtatttaaccttgagctcaggattctcatctgctcagctgaaggtgcggagacctctccccagaaggttctggggagcactcacctctcccccttgcagttccagcaggtccttgactttcttttttttttcttccatcaccttgtgagcactcgacgtgaaaagctgtgtctcgtccatcttcatatttgcagtatccgaaacagggcatggcttgttaaaactttgccgagcagatcattgattttacaaggctcctggcaaaaagtaggtttcccttctagaagaactaccaggtgctattagcaactgctattgctgtcgttttacgtagttccctcctatcatccggtccagggtttcctcaatggtatacccacagcaagctaacgatttgctccaaccctgcttggactgtggttccacatttattactaatcattagagacaccgacagttttggaggttcaagctgttcttccatcccccaaatggaagactctgttgtatctgcttcatacttgtctcctctggccgactgaattccttcatctttcctgccaagaagggaggaatcgcatccccatctcaggagaggaagggcaacacgcgtgtatcttggatacctgttgcgcgccatgaactactgtcgccgtgaaatctgatcatgtctattttcacagatgaagaaagtgaggcccagaagccttaactttcttgccccaaattgaagagctcccaaatgaatggagctagaaacagagatcgactgcctgacgtcaaactaaagctctcccccttagcatatcgcatcccactaggaagaacgacctgaccctctgagtgctatggtcctttcgtgtctttcagactggctgctgctccagacccctcagctggtgtttctggaaggggaaaccatcacgctaaggtgccatagctggaggaacaaaccactgaacaggatctcgttcttccataatgaaaaatccgtgaggtatcatcactacagtagtaatttctctatcccaaaagccaaccacagtcacagtggggactactactgcaaaggaagtctaggaaggacacagcaccagtccaagactgtcaccatcactgtccaaggtaagtggactctgtcaagatattggaaaaggagaagaggagataagcaaaggtttatataaacctacagtttatatagctccacatggagatctaggagtgccacagagcaaagctgagctttaaggcaaaggcaagagctatgaaggccttgccaagtgatgccaagtgggctcgggccagagttcctcacttgcaggcagtgggtgacaaggctgctgggcagcagagccttgttgttgctacatagatactttatgctcctagacattcctaagagctgaagtttaacttcttgtccctcatgtaacagccgttcactcttgaacactgttctagatagtggtagtaccagccactctgggaggcttcagatccatcctccctgccacctctgacggctgtcccttctgctactacactgttaccagtgtgccttcattagtttggtttaaggtttgtggggaggcacgagtctgtccactaaaggtatgcttatgaggtctcagggaaatgtactacacctatgagtgaccagacacagtgactgggcataggattggaggagggatggattcatggagagtacttaatacctgtcctcatgtctgtcttctccagggcccaagtccagcaggtctttaccagtattgacaattgtggctgctgtcactgggattgctgtcgcagccattgttattatcctagtatccttggtctatctcaagaaaaagcaggttccaggttggtggctctctttggtgcctcttattctcagctagctaggggttactcatttgattttgatattgtcccatcctattcattcacctacttacaaatatatctgttaagcaagacttgaacaaacctgatgatgtgccatgacctgtgctagacactgtaggcactggattccatttctacccccagctggctctcagcattgtgaggaataccaggcacaccagtgggtacttataagaagggattagaggcaatgctaaagacctgcttgtgtcctgccatcccaggacagtaatgcagaagaactgaagtctgaagccagggtcagtgagatggtccagccagtgcaaattcttgcagttcaagccctgtgatcttagttcaatcgctgggatccaagttaagttggagagagagagagaactgatcctacaagggtgtcctttgacctttgtagatgggctatggtgtgtaccgcaccccaccacagcaataaataccttaaaaagtatgtttttttttccaaagagtctgatgctagcttggactgtaggataaacttgaagccagcctgtgctacacagaaagactctttgtaaaatataaaagagagaggcgagtctataaccctgtgtgtttgtcagctttctgtcagtataacgaagtgcttcagataatctacctatgaaggaaaaacactgctaggcatggtggtatatatatacatatatatatataattttagcattcaggaagccaaggagggtcacaagttcaagattctatcttaaaatagctaagtaaataagtaagtttagttgagcactgttttatagacttggtccatattcccttggccctattgctttgggcccagcaaagctgtaatatcccacattcacaacaggataaaactctcacttaaggccagtaagaagagatcaaggaagagactggcaatcccacaatcttcttcttcaagagcatgtccctaatgacctaaagacttcccactaggcccaaaacactgaagggtcagcttcctcccagttattccaccttgaccaatcacttaacacatgagattttaatggacatctcagatctaaatggtggcaggcagcctggctggaacagttagaaaatgtttcattggggagccagtgtgatgttgtgactgaaatacacacacggggaccaaattgctgtggtccaaacctcaactcacagcttaccagatctataatgttgagtaaattactcagcctttgggccccagtttaccagtctggaaaatgaacactatggggcccaccttacaggaatattaggacaatgaataaggccaaagcctttgtaccagaacctcaaagacaaaaaagaacacatacatagaggttggagagatggctcagatgtaaagagtactgactgttcctccagaggaaccaggttcaattcccagtacccacacgacaggtcatagctgtaactctggctctaagggatctaacacccttgcacagacataaatgcaggaaaaacacagattcccatatagtgaaaatacatcattaaaaaaaatacataagtataagctgtcaccactgtggagaaggatgatgtcccgggggtaggcatcaaggcaaagtggaagagcgttctaggatctgtggccaagcgtggaaatgaggaatgttgtaggcaggtcaatggaagccattgaaaaaggggaaatactactactaactaatacctgatacctcaaagcacactctgcattggctagttatggaagattagtaaatactgagatatgcagatagaaaggttacactgttttctttagacagggtcttgctttgtaaccctaactagtctggaattcactgtgtagaccaggctggcctcaaactcacagagatcttcttgcctttgtctcctgggtgctgggattaaaggtctgctccattacgcccagccaaaagatcacacctttaaaaggctggacgaacccaggaaagttgcaggggggttgttttatgtcacacctctgggtgtcctgttgggttagtcactatgggctggagatgtttctgggcaggggagctgggaattggggaagagaggtgttgctggtgtgaggggaaggtctctgttgcttttaactctgttctgaccctgctccttgatcctgggctcaccccataatcctactaacttcctacgtgcccctcctagctctcccaggaaaccctgatcacagggaaatgggagaaacccttccagaggaagtaggtgagtacagacagccctctgggggctcagtgcctgtcagcccagggcctccatctggactggagccaacaagcagcagcccatgtgagttcagtgggagtacaggagagggaggagccgtgggagaaggctgtgactcaaatctcttggtcagttctgagtctaactcttggacctaaggaagatctcactagagatgagaacaggaacgttgattccggatcgaggaagagggtgggccgtgactaaactctagtaaaacaaggaatccggacacatttccagtacaggactgcaaaggcatttgcatcttttgggggagatgtggcagagttccaaaggacagggttagcagttgtgagacagaggtcaatggggtggggcagcctaggacaaaaagagatctgaggtaaccctggagatcttttcaggaaggtgtccctgtgtagaggtactgctgcgcttagaacagctcaacttttagtaaaatattgagaggagatttgagttgaggaaattctaggggattggagctattcataggatacactttgtgggcacaatgtggctctaatgcccactcatgatagtttataaaacattgacctgatcgttgatccatgatgatacaactgaatctggagtaggtcattccccaaagtgcggaaggaataagtgggtggatgagtggtttagatggcctctgaacccttatatagttccgagatttgaaagcctggtgcaggaggaagaatataggagtgggagttgtctcactgtagttaaagacaaagcataaaggctagtggagttctctagaggcttccatgacagcagaactaggcaggaggaagggtttcatgtagattgcatttcaggaggctggagtgtgactcagagctgagccaacagataagagagcttgagcaaaacagcattcacttagcttggcttagagcaaggtctgcattcttcagccaggctgcatagatccatgtccaggattgaactagatctataagaaaatcacaactggactcactttcttgtctggctctgtctactctggtataaacacatttcacatggcatttatgcagcctggcacctgagctggggtttcccctgaaggcatagttagctactgggattgctaagtagtatataaaagggaggagcaccgaatgcgttgtggggcagaatttagaacatagcaaatagggctctttgtgtttggggagcgagtgaagagactgaagacattgtctcaacctctttctcctcttccaaaaatgaaggtttatagacactggggttgcttttcctactggcaaagggaactttgggcaaaaatataagagaatgtggtgtttgggatattagagaaacatctttttcttctctttctttcccatttccctctctctttccctccctttctctcttctctttctttctccctctccgctctctttttctttctttaaaatatatttatttactttatgtatatgagtacacagcagaagagggcatcggattccatgatggatggttgtgagccaccatgtggtttctgggaattgaactcaggacctctgggacagtaatcaatgctcttaactactgagccatctctccagctcgctctctctctctctctctctctctctctctctctctctctctctctctctctctctctctctctctctctctctctctctgtcatagcatacctacttctccagtgcttcagcaagaataaactacacttgtccagtatggaaacagccatctgagaagacaaacatccgggcttgatttcactctgatctaaaccctgatctaaacccttctgcactccgttctccaacctcacagagcctcagtgctgcctagtctgctgctaggaaagttgagcgattttctgacaaggatgtggcatgtggtggggtttgtttccctttgccagtatggcctgcagagaaagctggcttccacgatggtcagggaaggaggcagcactgcttggcccaatagcctgggttggggttggcaagccgtgtctggggtcttcgctttgagctttggttttgcagcctcagtagcagcccatctggccctctttcccagcagtgcccatgctgatcacttattttcatccacagacaatcctcctgatctggaagaagctgccaaaactgaggtgagggagcccagccctgtcctatccctctccccgttcatctgcttccccacgacctctcctcagctctcatggctcgtttctgctttccctaggctgagaatacgatcacctactcacttctcaagcatcccgaagccctggatgaagaaacagagcatgattaccagaaccacatttagtctcccttggcattgggaaaagcaagccagaaaggccaggatctagtgtctcctggtccaagggatgctgtagatattaaagaaaacatccagagtcacttctgtgagtcctgaaaccaacagacactaagagattggttcccagtggttgactgtactaatgactcccataacttacagcttcccaactcaagactcttctgctatcgatccacactgccactaaaattaatcaacttactgccgttaagagactgcagcaacgtgggaactgcttataattcacgctaagataaggagaacaattaatgttaggatgcatcatctcggtgatgataaaccagacttgtaccaacctgtcaaaggtgatgcttctttataaggaacttcaattttttttatttttctataaaggtcgcatgttactttaatagtaaaatgttgtaaaaacaaaccatctttctatttactttttcaaggctgcaatgattggaatacaggctgagctctctggggtttgttggtcttctgccagaagactcttggggagatgggttaactttcccctggggagacataagagtcttaggtagagccctcatgacagaccaaagtcatatgattacactcaagtctagtttggtgcaccagtgagtttatccagcttatttgtggggacatgagtgaagggttcctttcaggggtgtggaagatcttataacaacagtcttagcaccaatgacgtctttacagccacatagatggtcccccaccccctctttagtttgtctccctcaaactcccagtcctgaagcctgtgcctttagacctccaggataatgagcatgcacgactatccaccaccacacctggcctggtagcagtagataggaggtagaggagaggacagacagggatttggagtagagggccagtgcccctcccctccaaactgaacatgcttccagtgaacttgtctttttgtttccacttccttcttctcttttctcctatgacaaacagagtaaccactttgttatgtaacaggagttctcaggaagtcaaactttggatgaaagccagtggtaactgaaggatgaccttgaactcctggtcttgctattcccacctcctagttgctcggagcatattatgtttgtatgttcgcaaaaatcactcaggcagctatttaagcttgctgtaaccacatgagttcagagtgtagacatataaagggaaaaaaagggagaaattctatgttgtcctcattcctctttcttcttcttcttcttcttcttcttcttcttcttcttcttacttcttcttcttcttcttcttcttnnnnnnnnnnnnnnnnnnnnnnnnnnnnnnnnnnnnnnnnnnnnnnnnnnnnnnnnnnnnnnnnnnnnnnnnnnnnnnnnnnnnnnnnnnnnnnnnnnnnnnnnnnnnnnnnnnnnnnnnnnnnnnnnnnnnnnnnnnnnnnnnnnnnnnnnnnnnnnnnnnnnnnnnnnnnnnnnnnnnnnnnnnnnnnnnnnnnnnnnnnnnnnnnnnnnnnnnnnnnnnnnnnnnnnnnnnnnnnnnnnnnnnnnnnnnnnnnnnnnnnnnnnnnnnnnnnnnnnnnnnnnnnnnnnnnnnnnnnnnnnnnnnnnnnnnnnnnnnnnnnnnnnnnnnnnnnnnnnnnnnnnnnnnnnnnnnnnnnnnnnnnnnnnnnnnnnnnnnnnnnnnnnnnnnnnnnnnnnnnnnnnnnnnnnnnnnnnnnnnnnnnnnnnnnnnnnnnnnnnnnnnnnnnnnnnnnnnnnnnnnnnnnnnnnnnnnnnnnnnnnnnnnnnnnnnnnnnnnnnnnnnnnnnnnnnnnnnnnnnnnnnnnnnnnnnnnnnnnnnnnnnnnnnnnnnnnnnnnnnnnnnnnnnnnnnnnnnnnnnnnnnnnnnnnnnnnnnnnnnnnnnnnnnnnnnnnnnnnnnnnnnnnnnnnnnnnnnnnnnnnnnnnnnnnnnnnnnnnnnnnnnnnnnnnnnnnnnnnnnnnnnnnnnnnnnnnnnnnnnnnnnnnnnnnnnnnnnnnnnnnnnnnnnnnnnnnnnnnnnnnnnnnnnnnnnnnnnnnnnnnnnnnnnnnnnnnnnnnnnnnnnnnnnnnnnnnnnnnnnnnnnnnnnnnnnnnnnnnnnnnnnnnnnnnnnnnnnnnnnnnnnnnnnnnnnnnnnnnnnnnnnnnnnnnnnnnnnnnnnnnnnnnnnnnnnnnnnnnnnnnnnnnnnnnnnnnnnnnnnnnnnnnnnnnnnnnnnnnnnnnnnnnnnnnnnnnnnnnnnnnnnnnnnnnnnnnnnnnnnnnnnnnnnnnnnnnnnnnnnnnnnnnnnnnnnnnnnnnnnnnnnnnnnnnnnnnnnnnnnnnnnnnnnnnnnnnnnnnnnnnnnnnnnnnnnnnnnnnnnnnnnnnnnnnnnnnnnnnnnnnnnnnnnnnnnnnnnnnnnnnnnnnnnnnnnnnnnnnnnnnnnnnnnnnnnnnnnnnnnnnnnnnnnnnnnnnnnnnnnnnnnnnnnnnnnnnnnnnnnnnnnnnnnnnnnnnnnnnnnnnnnnnnnnnnnnnnnnnnnnnnnnctctctctctctctctctctctctctctctctctctctccctctctcgttctctgtctgtctctgcctctctcaaatgaataaccattgttgtaggtgttgtgtacattcagggtatatatatttgttattgtttttagaaagcctatacatgtgattatattgttgacttattttgactgggcctttctggatgtcagcctagcttcaggctcattgaaagaccctatctcaaaggattaagcagagagagatagagcagggtatcagatgttttcctttgacctctgcacacccacacataggcagcccacacacatgtgtgcctatgacacatacaaataaaataaataacaataatttttaaaaatcactccagaatttctgctttgaactccctgataaccaagccgtggttgcacggatccatccttgtgtggatcttagtggttcaatccaaacacacagaacaaataaggttgtctgacaccagggagacctcccgaagctcttgcctaatgtgcacctttgagtgtgcctcatggaatcaagtcagttctttctcatatcctctttagcaagacccttcctggacactgctctttgtttttattttctccatggtacagtgtagataattatgcatctccttcttttatatattctcatatatactaaaatgtaagctcacaacagccctgtgttttcatttttcactaacatagtccagagaccagaacaacgcaatagattgttgaatgaattaataaataaaacttgcctctcatagtttctgggttatttgatattcttgcatgctggccaagtgctctaccactgagctacccggtgttatttgacgttcttgatgctgtggcttagatttgttcccctgaaaccatacattggaaacagtccccaatgcaagagaggtgggaggtggggtctgatgggaggtgactagcccacagcagagagctagttctgtgggagtggcttccttctaaaagggtgagtttgctatcttttggctgtttatccttcctgctccatttcccccttcttaacccatgaaatgacagggcaagaaaacctttaccagattctggtccctgggtcttgaacttcccagcctccagaatatgttaataaataaaaactccctgaggggttgtcatagcaacctgaaaaggactttctgaatctcaagaggtcaatgaaaacctatctttccttgaaaccttagcaaatttatctaaaattcttacatgcattggaaaagatttgaacttaaatagacttgggagtccgttttgaatttggtgtaaggtgagtacctgacaattttttcctgtcttgaggctaggtattccaaggttattccttgagcaaatgattgaaaatggttcaaatatcattatcaactcccacacacaggtctacacccatgtccagtcctctttggttgccttatttcatttctttcttcccacctcagtagcatacacattattattattattatattttgatgtgtagaaagccctgttttctctcatttgtttgtttcaagattttcttggctgttgttctcttctagataaacttcagaatttcacaaaccatagggccctgggataattgtctgtgtagattacttgcataaggttttacatctgtgttatactgagacctcccaaggtatagcttcttgcttgtttggataatagacttctcttataacatggccttttaaaaataggacatattagatgggctatggtggtgcacgcctttaatcccagcacttgggaggcagaggcaggcggannnnnnnnnnnnnnnnnnnnctgtcttgaggctaggtattccaaggttattccttgagcaaatgattgaaaatggttcaaatatcattatcaactcccacacacaggtctacacccatgtccagtcctctttggttgccttatttcatttctttcttcccacctcagtagcatacacattattattattattatattttgatgtgtagaaagccctgttttctctcatttgtttgtttcaagattttcttggctgttgttctcttctagataaacttcagaatttcacaaaccatagggccctgggataattgtctgtgtagattacttgcataaggttttacatctgtgttatactgagacctcccaaggtatagcttcttgcttgtttggataatagacttctcttataacatggccttttaaaaataggacatattagatgggctatggtggtgcacgcctttaatcccagcacttgggaggcagaggcaggcggatttctgagttcgaggccaacctggtctacaaagtgagttttaggacagccagggctacacagagaaaccctatctcaaaaaaaaaaaaaaaaaaaagacacactttatgtgcatttgtgttttcttgggtattgtatccatggagttacagagagttgtgagctgccaaatgggtgctgggaattgaacctgggccctttggaagagcagccagtgctcttaaccagtgaggcatctctccaaccccaacatggccatggtttgcatgagagtttagactccgtttcccccactccatatcactattactctgattaaaattttctatactttttgaagacaattttgaaaaggtgtattttttttcctggtaaatcacacattttattaatttaacagccagctactgcttcctctccttctttctctttctttcttcctttctctctctctctctctcccttcctttctctctctttctttctttctttctttctttctttctttctttctttctttctttctttcttcctttcttcctttcttccttcctttctttcttcctttcattgtaaggatctcatgtagccaagactgacctcacaatccctttatatagctaaggatggccttgatcctcctatctccacctcccacatgctggaattaaaggagtgtaccaatacccgatttgtgtggtccttcagatcacactcagggtttcctgcaaacaattacagcatttttttcctaataatttgtgtgtttctacttacccatggactcttccccccttcttagcttttgggctgtcttttatcaggatgacttggttgggaataacaggaaatcgtgattaaaattggtttaaacaataaggaaatctannnnnnnnnnnnnnnnnnnntcggtaccctaaaagtaagctcacaacagccctgtgttttcatttttcactaacatagtccagagaccagaacaatgcaatagattgttaaatgaattaataaataaaacttgcctctcatagtttctgggttatttgatattcttgcatgctggccaagtgctctaccactgagctacccggtgttatttgacgttcttgatgctgtggcttagatttgttcccctgaaaccatacattggaaacagtccccaatgcaagggaggtggggtctgatgggaggtgactagcccacagcagagagctagttttgtgggagtggcttccttctaaaagggcgagtttgctatcttttggctctgtttctccttcctgctccatttcccccttcttaacccatgaaatgacagggcaagaaagcctttaccagattctggtcccagcctccagaatataaagaattatattaataattaataaagaatcatccaagtccctgagggattgtcatagcaacctgaaaaggactttctgaatctcaagaggtcagtgaaaacctatctttccttgaaaccttagcaaatttatctaaaattcttacatgcattggaaaagatttgaacttaaatagacttgggagtccgttttgaatttggtgtaaggtgagtacctgacaattttttcctgtcttgaggctaggtattccaaggttattccttgagcaaatgattggaaatggttcaaatatcattatcaactcccacacacaggtctacacccatgtccagtcctcttccgttgccttatttcatttctttcttcccacctcagtagcatacacatcatcatcatcatcatcatcacatcatcatcattattattatcattatctttattatattttgatgtgtataaagccctgttttctctcattcgtttgtttcaagattttcttggctgctgttctcttctagataaacttcagaatttcacaaaccatagggccctgggataattgtctgtgtagattacttgcataaggttttatgtctgtgttatactgagacctcccaaggtatagcttcttgcttgtttggataatagacttctcttataacatggccttttaaaaataggacatattagatgggctatggtggcgcacgcctttaatcccagcacttgggaggcagaggcaggcggatttctgagttcgaggccaacctggtctacagagtgagttttaggacagccagggctactcagagaaaccctatctcgaaaaaaaaaaaaaaaaaaaaaaaaggacacattttatgtgcatttgtgttttcttgggtattgtatccatggagttacagagagttgtgagctgccaaatgggtgctgggaattgaacctgggccctttggaagagcagccagtgctcttaaccagtgaggcatctcttcaaccccaacatggccatgttttgcatgagagtttagactccgtttcccccactccatatcactattactctgattaaaattttctatactttttgaagacaattttgaaaaggtgtattttttttcctggtaaatcacacattttattaattggcatacagccagctgctgcttcctctccttctttctctttctttcttcctttctctctctctctcccttcctttctctctctctctctctttctttctttctttctttctttctttctttctttctttctttctttctttctttctttctttctttctttcttcctttcattgtaaggatctcatgtagccaaggctgacctcacactccctttatatagctaaggatggccttgatcctcctatctccacctcccacatgctggaattaaaggagtgtaccaatacccgatttgtgtggtccttcagatcacactcagggtttcctgcaaacaattacagcatttttttcccttataatttgtgtgtttctacttacccatggactcctccccccttcttagcttttgggctgtcttttatcaggatgacttggttgggaataacaggaaatcgtgattaaaattggtttaaacaataaggaaatctattatctcccataacaaaaagtctagagacagagagtctccttgcatcaggattctgagacatcccccctccccttttctgcaattctctggctactgtccttgggcaagtaagaacacatagcaactctacaggtcatatcctggtatctagaaaaagaaggggactaacttttttggtatgtctcttaaaagcaaggacaatattctcagaagccctgggcgatgctcttgtcatagtatactcaggatagaccattcttttttctttaatttttttattagatattttcttcatttacatttcaaatgctatcctgaaagtcctctataccccccgccctgctccccaacccaccctctcccacttcctggccctggcattcccctgtcctggggcatatgatcttcgcaagaccaaaggcctctcctcccattgttggctgactaggccatcctctgctacatatgcaactagagacacagttctgggggtactggttagttcatattgttgttcctcctatagggatgcagaccccttcagctcattgggtactttctctagctttttcattaggggcactgtgttccatcctatagatgactgtgagcatccacttttgtatttgctgggcactggcatagcctcacaagagatagctatatcagggtcctgtcagcaagatcttgctggcatatgcaatagtgtctgggtttgatggttgtatatgggatggatccccgggtggggcagtctctggatggtccttccttccgtctcagctctgaactttgtctctgtaactccttccatgggtattttgttccccattctaagaaggaacgaagtatccacactttggtcttccttcttcttgagtttcatgtgttttgcaaattatatcttgggtagtctaaatttctgggttaatatctgcttatcagtgagtgcatatcatgtgtgttcttttgtgattgggttatctcactcaggatgatatccttcagatccatccatttgcccaagaatttcataaattcattgtttttaatagctaagtagtacgccattgtgtaaatgtaccacattttctgtatccatttgtctgttgatggacatctggattctttccagctcctggctattataaataaggctgctatgaacatagtggaacatgtgtccttattataagttggaacttcttctgggcatatgcccaggagaggtattgctggatcttccggtagtactatatccaattttctgaggaaccgccagactgatttccagagtggttgtaccagcttgcaatcccaccaacaatggaagagtgttcctctttctcctcatcctcaccagcatctgctgtcacctgaatttttgatcttagccattctgactggtgtgaggtagaatcttagggttgttttgatttgcatttccctgatgattaaagatattgaacttttttttcaagtacttctcagccattcggtattcctcagttgagaattctttgtttagctctgtaccccatttcttaatgggttatttgatttttctggagtccatctttttacgttctttatatatattagatattcatcccctttctaatttaggattggtaaagatcctttcccaatctgtggtggcctttttgtcttattgacagtgtcttttgtcttatagaagctttgcaattttatgaggtcccatttgtcaattcttgatcttacagcacaagccattgctgttctgttcaggatttttttctctgtgcccatatcttcgaggctttcccccactttctcctctataagtttcagtgaggatagaccattcttaaagccctgatttaaaaggagaccaagatgaccatcacatacctagcttaatcccgtcaaagaagagtgactgttgagactgaaacctaaccgctgtgtctttgtccctcctggatgcctcgataaaggtttacctggttgatttgttttgctttctttttttctgacttgtgataactttgactttttttttttttttttttttttgagacagggtttctctgtatagccctggctgtcctggaactcactctgtagaccaggctggcctcgaactcagaaatccacctgcctctgcctcccaagtgctgggattaaaggcgtgtgccaccactgcccggcaactttgacttattaatcaagtattttgccttttgcttggtttcaagcatgatattttctactttatttacatttatgtgatatattacttatttctaaatttcttgttttcaaacaaattaataaaaggctgtaacttctccctgtattgatgttttggccataagcatttgacttaaatatgcatgtctgtctatgttctttctgaatagtttataattttagctttattttcttccttttttaggctttattttattttatttattaatatttatttatttatgtatttatttatgtcaccacgacacaagccaggat

SEQ ID NO: 1187 - DNA, 1341 bp, Mus musculus
tgtgcctgcagctgactcgctccagagctgatgggaatcctgccgttcctactgatccccatggagagcaactggactgtccatgtgttctcacggactttgtgccatatgctactgtggacagccgtgctaaatcttgctgctgggactcatgatcttccaaaggctgtggtcaaactcgagcccccgtggatccaggtgctcaaggaagacacggtgacactgacatgcgaagggacccacaaccctgggaactcttctacccagtggttccacaatgggaggtccatccggagccaggtccaagccagctacacgtttaaggccacagtcaatgacagtggagaatatcggtgtcaaatggagcagacccgcctcagcgaccctgtagatctgggagtgatttctgactggctgctgctccagacccctcagctggtgtttctggaaggggaaaccatcacgctaaggtgccatagctggaggaacaaaccactgaacaggatctcgttcttccataatgaaaaatccgtgaggtatcatcactacagtagtaatttctctatcccaaaagccaaccacagtcacagtggggactactactgcaaaggaagtctaggaaggacacagcaccagtccaagactgtcaccatcactgtccaagggcccaagtccagcaggtctttaccagtattgacaattgtggctgctgtcactgggattgctgtcgcagccattgttattatcctagtatccttggtctatctcaagaaaaagcaggttccagacaatcctcctgatctggaagaagctgccaaaactgaggctgagaatacgatcacctactcacttctcaagcatcccgaagccctggatgaagaaacagagcatgattaccagaaccacatttagtctcccttggcattgggaaaagcaagccagaaaggccaggatctagtgtctcctggtccaagggatgctgtagatattaaagaaaacatccagagtcacttctgtgagtcctgaaaccaacagacactaagagattggttcccagtggttgactgtactaatgactcccataacttacagcttcccaactcaagactcttctgctatcgatccacactgccactaaaattaatcaacttactgccgttaagagactgcagcaacgtgggaactgcttataattcacgctaagataaggagaacaattaatgttaggatgcatcatctcggtgatgataaaccagacttgtaccaacctgtcaaaggtgatgcttctttataaggaacttcaattttttttatttttctataaaggtcgcatgttacttt

SEQ ID NO: 1188 - protein, 298 aa, Mus musculus
LAPELMGILPFLLIPMESNWTVHVFSRTLCHMLLWTAVLNLAAGTHDLPKAVVKLEPPWIQVLKEDTVTLTCEGTHNPGNSSTQWFHNGRSIRSQVQASYTFKATVNDSGEYRCQMEQTRLSDPVDLGVISDWLLLQTPQLVFLEGETITLRCHSWRNKPLNRISFFHNEKSVRYHHYSSNFSIPKANHSHSGDYYCKGSLGRTQHQSKTVTITVQGPKSSRSLPVLTIVAAVTGIAVAAIVIILVSLVYLKKKQVPDNPPDLEEAAKTEAENTITYSLLKHPEALDEETEHDYQNHI

SEQ ID NO: 1189 - DNA, 35460 bp, Homo sapiens
  misc_feature (1)...(35460): n = A,T,C or G
nnnnnnnnnnnnnnnnnnnnnnnnnnnnnnnnnnnnnnnnnnnnnnnnnnnnnnnnnnnnnnnnnnnnnnnnnnnnnnnnnnnnnnnnnnnnnnnnnnnnnnnnnnnnnnnnnnnnnnnnnnnnnnnnnnnnnnnnnnnnnnnnnnnnnnnnnnnnnnnnnnnnnnnnnnnnnnnnnnnnnnnnnnnnnnnnnnnnnnnnnnnnnnnnnnnnnnnnnnnnnnnnnnnnnnnnnnnnnnnnnnnnnnnnnnnnnnnnnnnnnnnnnnnnnnnnnnnnnnnnnnnnnnnnnnnnnnnnnnnnnnnnnnnnnnnnnnnnnnnnnnnnnnnnnnnnnnnnnnnnnnnnnnnnnnnnnnnnnnnnnnnnnnnnnnnnnnnnnnnnnnnnnnnnnnnnnnnnnnnnnnnnnnnnnnnnnnnnnnnnnnnnnnnnnnnnnnnnnnnnnnnnnnnnnnnnnnnnnnnnnnnnnnnnnnnnnnnnnnnnnnnnnnnnnnnnnnnnnnnnnnnnnnnnnnnnnnnnnnnnnnnnnnnnnnnnnnnnnnnnnnnnnnnnnnnnnnnnnnnnnnnnnnnnnnnnnnnnnnnnnnnnnnnnnnnnnnnnnnnnnnnnnnnnnnnnnnnnnnnnnnnnnnnnnnnnnnnnnnnnnnnnnnnnnnnnnnnnnnnnnnnnnnnnnnnnnnnnnnnnnnnnnnnnnnnnnnnnnnnnnnnnnnnnnnnnnnnnnnnnnnnnnnnnnnnnnnnnnnnnnnnnnnnnnnnnnnnnnnnnnnnnnnnnnnnnnnnnnnnnnnnnnnnnnnnnnnnnnnnnnnnnnnnnnnnnnnnnnnnnnnnnnnnnnnnnnnnnnnnnnnnnnnnnnnnnnnnnnnnnnnnnnnnnnnnnnnnnnnnnnnnnnnnnnnnnnnnnnnnnnnnnnnnnnnnnnnnnnnnnnnnnnnnnnnnnnnnnnnnnnnnnnnnnnnnnnnnnnnnnnnnnnnnnnnnnnnnnnnnnnnnnnnnnnnnnnnnnnnnnnnnnnnnnnnnnnnnnnnnnnnnnnnnnnnnnnnnnnnnnnnnnnnnnnnnnnnnnnnnnnnnnnnnnnnnnnnnnnnnnnnnnnnnnnnnnnnnnnnnnnnnnnnnnnnnnnnnnnnnnnnnnnnnnnnnnnnnnnnnnnnnnnnnnnnnnnnnnnnnnnnnnnnnnnnnnnnnnnnnnnnnnnnnnnnnnnnnnnnnnnnnnnnnnnnnnnnnnnnnnnnnnnnnnnnnnnnnnnnnnnnnnnnnnnnnnnnnnnnnnnnnnnnnnnnnnnnnnnnnnnnnnnnnnnnnnnnnnnnnnnnnnnnnnnnnnnnnnnnnnnnnnnnnnnnnnnnnnnnnnnnnnnnnnnnnnnnnnnnnnnnnnnnnnnnnnnnnnnnnnnnnnnnnnnnnnnnnnnnnnnnnnnnnnnnnnnnnnnnnnnnnnnnnnnnnnnnnnnnnnnnnnnnnnnnnnnnnnnnnnnnnnnnnnnnnnnnnnnnnnnnnnnnnnnnnnnnnnnnnnnnnnnnnnnnnnnnnnnnnnnnnnnnnnnnnnnnnnnnnnnnnnnnnnnnnnnnnnnnnnnnnnnnnnnnnnnnnnnnnnnnnnnnnnnnnnnnnnnnnnnnnnnnnnnnnnnnnnnnnnnnnnnnnnnnnnnnnnnnnnnnnnnnnnnnnnnnnnnnnnnnnnnnnnnnnnnnnnnnnnnnnnnnnnnnnnnnnnnnnnnnnnnnnnnnnnnnnnnnnnnnnnnnnnnnnnnnnnnnnnnnnnnnnnnnnnnnnnnnnnnnnnnnnnnnnnnnnnnnnnnnnnnnnnnnnnnnnnnnnnnnnnnnnnnnnnnnnnnnnnnnnnnnnnnnnnnnnnnnnnnnnnnnnnnnnnnnnnnnnnnnnnnnnnnnnnnnnnnnnnnnnnnnnnnnnnnnnnnnnnnnnnnnnnnnnnnnnnnnnnnnnnnnnnnnnnnnnnnnnnnnnnnnnnnnnnnnnnnnnnnnnnnnnnnnnnnnnnnnnnnnnnnnnnnnnnnnnnnnnnnnnnnnnnnnnnnnnnnnnnnnnnnnnnnnnnnnnnnnnnnnnnnnnnnnnnnnnnnnnnnnnnnnnnnnnnnnnnnnnnnnnnnnnnnnnnnnnnnnnnnnnnnnnnnnnnnnnnnnnnnnnnnnnnnnnnnnnnnnnnnnnnnnnnnnnnnnnnnnnnnnnnnnnnnnnnnnnnnnnnnnnnnnnnnnnnnnnnnnnnnnnnnnnnnnnnnnnnnnnnnnnnnnnnnnnnnnnnnnnnnnnnnnnnnnnnnnnnnnnnnnnnnnnnnnnnnnnnnnnnnnnnnnnnnnnnnnnnnnnnnnnnnnnnnnnnnnnnnnnnnnnnnnnnnnnnnnnnnnnnnnnnnnnnnnnnnnnnnnnnnnnnnnnnnnnnnnnnnnnnnnnnnnnnnnnnnnnnnnnnnnnnnnnnnnnnnnnnnnnnnnnnnnnnnnnnnnnnnnnnnnnnnnnnnnnnnnnnnnnnnnnnnnnnnnnnnnnnnnnnnnnnnnnnnnnnnnnnnnnnnnnnnnnnnnnnnnnnnnnnnnnnnnnnnnnnnnnnnnnnnnnnnnnnnnnnnnnnnnnnnnnnnnnnnnnnnnnnnnnnnnnnnnnnnnnnnnnnnnnnnnnnnnnnnnnnnnnnnnnnnnnnnnnnnnnnnnnnnnnnnnnnnnnnnnnnnnnnnnnnnnnnnnnnnnnnnnnnnnnnnnnnnnnnnnnnnnnnnnnnnnnnnnnnnnnnnnnnnnnnnnnnnnnnnnnnnnnnnnnnnnnnnnnnnnnnnnnnnnnnnnnnnnnnnnnnnnnnnnnnnnnnnnnnnnnnnnnnnnnnnnnnnnnnnnnnnnnnnnnnnnnnnnnnnnnnnnnnnnnnnnnnnnnnnnnnnnnnnnnnnnnnnnnnnnnnnnnnnnnnnnnnnnnnnnnnnnnnnnnnnnnnnnnnnnnnnnnnnnnnnnnnnnnnnnnnnnnnnnnnnnnnnnnnnnnnnnnnnnnnnnnnnnnnnnnnnnnnnnnnnnnnnnnnnnnnnnnnnnnnnnnnnnnnnnnnnnnnnnnnnnnnnnnnnnnnnnnnnnnnnnnnnnnnnnnnnnnnnnnnnnnnnnnnnnnnnnnnnnnnnnnnnnnnnnnnnnnnnnnnnnnnnnnnnnnnnnnnnnnnnnnnnnnnnnnnnnnnnnnnnnnnnnnnnnnnnnnnnnnnnnnnnnnnnnnnnnnnnnnnnnnnnnnnnnnnnnnnnnnnnnnnnnnnnnnnnnnnnnnnnnnnnnnnnnnnnnnnnnnnnnnnnnnnnnnnnnnnnnnnnnnnnnnnnnnnnnnnnnnnnnnnnnnnnnnnnnnnnnnnnnnnnnnnnnnnnnnnnnnnnnnnnnnnnnnnnnnnnnnnnnnnnnnnnnnnnnnnnnnnnnnnnnnnnnnnnnnnnnnnnnnnnnnnnnnnnnnnnnnnnnnnnnnnnnnnnnnnnnnnnnnnnnnnnnnnnnnnnnnnnnnnnnnnnnnnnnnnnnnnnnnnnnnnnnnnnnnnnnnnnnnnnnnnnnnnnnnnnnnnnnnnnnnnnnnnnnnnnnnnnnnnnnnnnnnnnnnnnnnnnnnnnnnnnnnnnnnnnnnnnnnnnnnnnnnnnnnnnnnnnnnnnnnnnnnnnnnnnnnnnnnnnnnnnnnnnnnnnnnnnnnnnnnnnnnnnnnnnnnnnnnnnnnnnnnnnnnnnnnnnnnnnnnnnnnnnnnnnnnnnnnnnnnnnnnnnnnnnnnnnnnnnnnnnnnnnnnnnnnnnnnnnnnnnnnnnnnnnnnnnnnnnnnnnnnnnnnnnnnnnnnnnnnnnnnnnnnnnnnnnnnnnnnnnnnnnnnnnnnnnnnnnnnnnnnnnnnnnnnnnnnnnnnnnnnnnnnnnnnnnnnnnnnnnnnnnnnnnnnnnnnnnnnnnnnnnnnnnnnnnnnnnnnnnnnnnnnnnnnnnnnnnnnnnnnnnnnnnnnnnnnnnnnnnnnnnnnnnnnnnnnnnnnnnnnnnnnnnnnnnnnnnnnnnnnnnnnnnnnnnnnnnnnnnnnnnnnnnnnnnnnnnnnnnnnnnnnnnnnnnnnnnnnnnnnnnnnnnnnnnnnnnnnnnnnnnnnnnnnnnnnnnnnnnnnnnnnnnnnnnnnnnnnnnnnnnnnnnnnnnnnnnnnnnnnnnnnnnnnnnnnnnnnnnnnnnnnnnnnnnnnnnnnnnnnnnnnnnnnnnnnnnnnnnnnnnnnnnnnnnnnnnnnnnnnnnnnnnnnnnnnnnnnnnnnnnnnnnnnnnnnnnnnnnnnnnnnnnnnnnnnnnnnnnnnnnnnnnnnnnnnnnnnnnnnnnnnnnnnnnnnnnnnnnnnnnnnnnnnnnnnnnnnnnnnnnnnnnnnnnnnnnnnnnnnnnnnnnnnnnnnnnnnnnnnnnnnnnnnnnnnnnnnnnnnnnnnnnnnnnnnnnnnnnnnnnnnnnnnnnnnnnnnnnnnnnnnnnnnnnnnnnnnnnnnnnnnnnnnnnnnnnnnnnnnnnnnnnnnnnnnnnnnnnnnnnnnnnnnnnnnnnnnnnnnnnnnnnnnnnnnnnnnnnnnnnnnnnnnnnnnnnnnnnnnnnnnnnnnnnnnnnnnnnnnnnnnnnnnnnnnnnnnnnnnnnnnnnnnnnnnnnnnnnnnnnnnnnnnnnnnnnnnnnnnnnnnnnnnnnnnnnnnnnnnnnnnnnnnnnnnnnnnnnnnnnnnnnnnnnnnnnnnnnnnnnnnnnnnnnnnnnnnnnnnnnnnnnnnnnnnnnnnnnnnnnnnnnnnnnnnnnnnnnnnnnnnnnnnnnnnnnnnnnnnnnnnnnnnnnnnnnnnnnnnnnnnnnnnnnnnnnnnnnnnnnnnnnnnnnnnnnnnnnnnnnnnnnnnnnnnnnnnnnnnnnnnnnnnnnnnnnnnnnnnnnnnnnnnnnnnnnnnnnnnnnnnnnnnnnnnnnnnnnnnnnnnnnnnnnnnnnnnnnnnnnnnnnnnnnnnnnnnnnnnnnnnnnnnnnnnnnnnnnnnnnnnnnnnnnnnnnnnnnnnnnnnnnnnnnnnnnnnnnnnnnnnnnnnnnnnnnnnnnnnnnnnnnnnnnnnnnnnnnnnnnnnnnnnnnnnnnnnnnnnnnnnnnnnnnnnnnnnnnnnnnnnnnnnnnnnnnnnnnnnnnnnnnnnnnnnnnnnnnnnnnnnnnnnnnnnnnnnnnnnnnnnnnnnnnnnnnnnnnnnnnnnnnnnnnnnnnnnnnnnnnnnnnnnnnnnnnnnnnnnnnnnnnnnnnnnnnnnnnnnnnnnnnnnnnnnnnnnnnnnnnnnnnnnnnnnnnnnnnnnnnnnnnnnnnnnnnnnnnnnnnnnnnnnnnnnnnnnnnnnnnnnnnnnnnnnnnnnnnnnnnnnnnnnnnnnnnnnnnnnnnnnnnnnnnnnnnnnnnnnnnnnnnnnnnnnnnnnnnnnnnnnnnnnnnnnnnnnnnnnnnnnnnnnnnnnnnnnnnnnnnnnnnnnnnnnnnnnnnnnnnnnnnnnnnnnnnnnnnnnnnnnnnnnnnnnnnnnnnnnnnnnnnnnnnnnnnnnnnnnnnnnnnnnnnnnnnnnnnnnnnnnnnnnnnnnnnnnnnnnnnnnnnnnnnnnnnnnnnnnnnnnnnnnnnnnnnnnnnnnnnnnnnnnnnnnnnnnnnnnnnnnnnnnnnnnnnnnnnnnnnnnnnnnnnnnnnnnnnnnnnnnnnnnnnnnnnnnnnnnnnnnnnnnnnnnnnnnnnnnnnnnnnnnnnnnnnnnnnnnnnnnnnnnnnnnnnnnnnnnnnnnnnnnnnnnnnnnnnnnnnnnnnnnnnnnnnnnnnnnnnnnnnnnnnnnnnnnnnnnnnnnnnnnnnnnnnnnnnnnnnnnnnnnnnnnnnnnnnnnnnnnnnnnnnnnnnnnnnnnnnnnnnnnnnnnnnnnnnnnnnnnnnnnnnnnnnnnnnnnnnnnnnnnnnnnnnnnnnnnnnnnnnnnnnnnnnnnnnnnnnnnnnnnnnnnnnnnnnnnnnnnnnnnnnnnnnnnnnnnnnnnnnnnnnnnnnnnnnnnnnnnnnnnnnnnnnnnnnnnnnnnnnnnnnnnnnnnnnnnnnnnnnnnnnnnnnnnnnnnnnnnnnnnnnnnnnnnnnnnnnnnnnnnnnnnnnnnnnnnnnnnnnnnnnnnnnnnnnnnnnnnnnnnnnnnnnnnnnnnnnnnnnnnnnnnnnnnnnnnnnnnnnnnnnnnnnnnnnnnnnnnnnnnnnnnnnnnnnnnnnnnnnnnnnnnnnnnnnnnnnnnnnnnnnnnnnnnnnnnnnnnnnnnnnnnnnnnnnnnnnnnnnnnnnnnnnnnnnnnnnnnnnnnnnnnnnnnnnnnnnnnnnnnnnnnnnnnnnnnnnnnnnnnnnnnnnnnnnnnnnnnnnnnnnnnnnnnnnnnnnnnnnnnnnnnnnnnnnnnnnnnnnnnnnnnnnnnnnnnnnnnnnnnnnnnnnnnnnnnnnnnnnnnnnnnnnnnnnnnnnnnnnnnnnnnnnnnnnnnnnnnnnnnnnnnnnnnnnnnnnnnnnnnnnnnnnnnnnnnnnnnnnnnnnnnnnnnnnnnnnnnnnnnnnnnnnnnnnnnnnnnnnnnnnnnnnnnnnnnnnnnnnnnnnnnnnnnnnnnnnnnnnnnnnnnnnnnnnnnnnnnnnnnnnnnnnnnnnnnnnnnnnnnnnnnnnnnnnnnnnnnnnnnnnnnnnnnnnnnnnnnnnnnnnnnnnnnnnnnnnnnnnnnnnnnnnnnnnnnnnnnnnnnnnnnnnnnnnnnnnnnnnnnnnnnnnnnnnnnnnnnnnnnnnnnnnnnnnnnnnnnnnnnnnnnnnnnnnnnnnnnnnnnnnnnnnnnnnnnnnnnnnnnnnnnnnnnnnnnnnnnnnnnnnnnnnnnnnnnnnnnnnnnnnnnnnnnnnnnnnnnnnnnnnnnnnnnnnnnnnnnnnnnnnnnnnnnnnnnnnnnnnnnnnnnnnnnnnnnnnnnnnnnnnnnnnnnnnnnnnnnnnnnnnnnnnnnnnnnnnnnnnnnnnnnnnnnnnnnnnnnnnnnnnnnnnnnnnnnnnnnnnnnnnnnnnnnnnnnnnnnnnnnnnnnnnnnnnnnnnnnnnnnnnnnnnnnnnnnnnnnnnnnnnnnnnnnnnnnnnnnnnnnnnnnnnnnnnnnnnnnnnnnnnnnnnnnnnnnnnnnnnnnnnnnnnnnnnnnnnnnnnnnnnnnnnnnnnnnnnnnnnnnnnnnnnnnnnnnnnnnnnnnnnnnnnnnnnnnnnnnnnnnnnnnnnnnnnnnnnnnnnnnnnnnnnnnnnnnnnnnnnnnnnnnnnnnnnnnnnnnnnnnnnnnnnnnnnnnnnnnnnnnnnnnnnnnnnnnnnnnnnnnnnnnnnnnnnnnnnnnnnnnnnnnnnnnnnnnnnnnnnnnnnnnnnnnnnnnnnnnnnnnnnnnnnnnnnnnnnnnnnnnnnnnnnnnnnnnnnnnnnnnnnnnnnnnnnnnnnnnnnnnnnnnnnnnnnnnnnnnnnnnnnnnnnnnnnnnnnnnnnnnnnnnnnnnnnnnnnnnnnnnnnnnnnnnnnnnnnnnnnnnnnnnnnnnnnnnnnnnnnnnnnnnnnnnnnnnnnnnnnnnnnnnnnnnnnnnnnnnnnnnnnnnnnnnnnnnnnnnnnnnnnnnnnnnnnnnnnnnnnnnnnnnnnnnnnnnnnnnnnnnnnnnnnnnnnnnnnnnnnnnnnnnnnnnnnnnnnnnnnnnnnnnnnnnnnnnnnnnnnnnnnnnnnnnnnnnnnnnnnnnnnnnnnnnnnnnnnnnnnnnnnnnnnnnnnnnnnnnnnnnnnnnnnnnnnnnnnnnnnnnnnnnnnnnnnnnnnnnnnnnnnnnnnnnnnnnnnnnnnnnnnnnnnnnnnnnnnnnnnnnnnnnnnnnnnnnnnnnnnnnnnnnnnnnnnnnnnnnnnnnnnnnnnnnnnnnnnnnnnnnnnnnnnnnnnnnnnnnnnnnnnnnnnnnnnnnnnnnnnnnnnnnnnnnnnnnnnnnnnnnnnnnnnnnnnnnnnnnnnnnnnnnnnnnnnnnnnnnnnnnnnnnnnnnnnnnnnnnnnnnnnnnnnnnnnnnnnnnnnnnnnnnnnnnnnnnnnnnnnnnnnnnnnnnnnnnnnnnnnnnnnnnnnnnnnnnnnnnnnnnnnnnnnnnnnnnnnnnnnnnnnnaaagaaagccagaaagaaagaaagaaaggaagaaagagagagaaagaaagaaaggaaaaactccacaggttactcgtttctaccttatcttacatgaagtgccaatttaccgagagcaagacaatacataatcgactattcccctacctgctacttttcccttacaacacgtggattaccatactcttcctctttcccctccagcctgcttttcctctaaatattgaaaccctcaaattcatctttggagaaagtcacagaccacatactgtttctgtgattctgtgttgttttcttccaggcatgtccttaaccttggcaaaataaacttctaaattaattgccacctgtctcagatacccttggttttacagtaagaattcacatgcttacatagtaactattaattttggtttcttagtgtgttacctatatattgtatgcctttgtttctaatgatatttataaagtattgatgccagctcattgttatcacattgccagttaaaaaaaaaactaatttttaacctaaaaattagataagagctggagatggatctgggggtagaacgggggcagtagtaaaagcacgcgtcagagtgggtggggctgtcgaaggtttctgaagaccacagagtgtgataacaaggttttacagtgtcatttccttaagtattaaagtattacagcctgcttcctgagaaggcatttgggaaagagtccccagaaaggggccccaggagagattccagagaaactcgtgttttggagatgttgagggtgaacaaatggtaatgaggatgatgacagaacgcaagaaaagagaactagcattcaccggacacccacgatgtaccaagcactttgctaaccctcatattctcttttactttccaaaaacctgtagtactgtggttctcagccaggggcaattcatcccctggggaacacttgctaatatctgggggcatatttgttttcacaactgggagtgccactggcatctaacaggtagagcccaggagtgctgcggaacatcctacaatgctcagggaaggtcctcacaagaataatttggcccacaatgtccatagtgctcaggctgagaaaccgtgcttaaatggtaggcacaataatcttcacttttacagattggaacctgacactctgagaagccacctggcattcaacccgaaacctaacacagctccaaagcccatgctctttcaccatgccgttgcagtgagaacagggatggaaatgagggtggcaaaaatgaccaagatacaaaaccagggcacagattggtgctcaatagatacttattgggatattcattaaatagaagaatgaataagaaaaagaatgaatgagggcaggggaataatgaggatgagtgtggtcattctattgccatcctgacatacctccttgtccttgttccacaactcagcagtgagtctgggattatgacaatagagaaaattaaatgatggtaggtggcctggagtccccatgctcaatttcaagaagcatccagattccagggcctgggtctccaaatggaagtagaagtactagaagattgctggtgcacgctgtcctgcatcaccctttctcaggaggatagagactgaaacaggaggttctgagctgagttttggtgaccatttccctctttctcccagaggcccaggccagctgtggcctcagaggaagaagaagggagttgtttccctagtttctaaaatttctgtgaatttgaacatgggctacaccagatttattctgggaagctctgaatcttctaggagggaaagactgagaggaaagagggtggaaagggaggagcctgtgataaaacagaacatttctttttcacttcccctttcagactccagaatttgtttgccctctagggtagaatccgccaagctttgagagaaggctgtgactgctgtgctctgggcgccagctcgctccagggagtgatgggaatcctgtcattcttacctgtccttgccactgagagtgactgggctgactgcaagtccccccagccttggggtcatatgcttctgtggacagctgtgctattcctgggtgagtcagggcccccaggagggagagaggaacgggaacctcagttggggataaccctgggcaaggatgaggggtggcatgggaagaccgtcaggacacccaggggagggaaggcaggctggtgaagatgaaaccctgatgactctgctggctttggaaagtcatccaatgtggcagagttcagggttttttcagtgtctttcacccaatcttactgaacacccagactcttgatgttctgttgctttccacatcagaacccgctctgagaaaagtctagtaacctatacttgaatgataaatgaatggccagagtgtttgccttctttgaaatttatgcttcacaaaagaccaaatcttaggcaggagggccagtgctgcctcgggtaaggggtagggaggaagttgtaagatgcatttttgggaggaggtggcagtggccattctctgtgcccctgaaaccactttgtgtagcagaagcctattgtcttcatgtgtaagaatattcccctaggcagaagcacagggagatctgggttatccagggaaaagggactctgagaatacaaaaacctgggtaagtctggagtcatctgttgtgggaccagagaaatcatgcatgctgcttttgaccacacagaccatgatggggaagtactgcatctgatcagcaagagagacagggtctttggccaaaatggagggctcttttctaaccatgttctcagctgttggataggggacgacgactgattttgctgagtggtttgaaaagcctaggggaggccaagtaggggagacttactgccaggactatctctccaagctcagttcctggggcttccaccctcacattctagaggaaagcatattgccactcagccaagttgtgtgatgtgattactagtgaaacgtgatcagctctgggggccctcggctcttggctgtcaatgcaggatgatactgggctacaggagaaagaggtaaggaagacagagtattcccccatgaataggatggaatggattaaagtagaagagaaagtaaagtgaactacctcatttgtcatgtggggaagttcaggcctagagaggtgatgtgcttctctaccacctgggcaagactcctgggaaagatctttggtattttttcccatttgccttttactaagtcatcaaagatttaccccattttttccattcttattggggctgccacatttacgtcttcatcacttgataactcaatttttatagcaccctctgatggggtcttgattgatcctgtctcccctcccctgcatccatgctgcccaccaaggccacggcatcttcaggtccagctatggctgtgtcagtgcatttaataaatgccttccgtgctgctccattgcccactgcaaaaactctaattctgccctgcacactgtgttctccattgcaccccacatgaatcttcttctacagccaggcagtatgtacactgcactttctgtttttaccacctttgctcctgctgactctccaaattctatgtgcaggcactgttctaggacttggagacttatcagtgaacatgactgacagccttcctgaccggaaatacgaggtcaatgaacttattgtgaagcaataagtacaccgggtgggaggatatttggtatttactactatttattaactgtggaatggatacataattggtgacttctctctcctttcctcatcttttccttttttttctctcgctcttcctcttcttttttactctctctcccactacaccgtcccccttgccaatcctacatactcaggtttttagctaccacttctatgtcaataactcctaaacctatttctcttgcttgcttctgtcaagtataattttatatttccactgctggttggacacctctaaaatgattctccagctcaaaaacaaagcatattcaaaatgcaacttatcatctcctccttacaaatgttctcttcctcctaacatttgtatttgcgtaagcgcagccacccttttcctagttatccaacttaaatcacccccacagtctattaaatgccaacttctctctgccacttaaatttcttctgcatctgtttcctcttcttcacctcctattgtcagtacaactttgggctctcttatctcccacctagattcaaccagtgaatgatttccagagcaatggcacatcaaattaatatggctactgctctctttgaatttatattctactgagggatataaacggtaagtaaacaaacaagaaggcataagtacaaatggaaaagggctatgaagatgtaaacggggtactgtgataagattagttgtggggaagagaagagagcagcccactttaaacaggatgttatgtaaagagttttctgagggggtgacatttaagctgagactttcaacatggtaaggattcagccatttggtgatcaaggacgcatttcagggtagagggattggcatacagaaaatccccaaatttgaagaatgccaggaaggccagtgttaatgaggctcaatgagtaggtgaaaagggatctgagctgaggctggagaaggaagcacggacccaatttgatagggcttgcaggccatttccattttattttaagaccaaagaaaggcaactgaaggcttgtaagttggggagtgatatcatctgatttcgtttttttttttttttttaaggaactagcttctttatggaaaatggattgtagggtgaccataagaagtgaggggacaaattaagatatgggaaaaagctgatggtgacttaaactgagtagtgtctataaagggggtgaagagaagttagtgggtgcaagatctaagttggaagcaggatcaacaagacttcctggtgtggaagggactggattttgggagacagagaggttaaaagatggcttgcaggtttctggcctatgtagctgggtggataacgaagatacatattgacatggggaagacggagagaaacagaatgtgtccacttgctatgacaacatgaagccattggtgattttgacaagaaaagttttagtggactgctgagggccgagtccaaattgcagagaattagacagtgaatgagaggagaagaaatcaggacagcctatgtaagaaaaacaatggagaaatttagttttgaaagggatgagacaggccaggcacagtggctcatgcctgtaatcccaacacttggagaggccgaggtgggtggatcacttaaggtcaggagttcaagaccagcttggccaacatggtgaaacaccatctctactaaaaatacaaaaattagccggatgtggtggtaatacaaaagttagccgggcgtggtggtgcatgcctgtaatcccagctgcttgggaagctgaggcaggagaattgcttgaatctgggaggcggaggtcgtagtgcactgagatggtgccgctgcactccagcctgggtgaagcaaacaacaacaacaacaaaaaccgagagaaatggggcagtagctggaattatatgtggtgtcaaggaaaagtttttttttgttttttgtttttaatggaagatactgaaataaatttaccattgatgggaagatccagctaagagagaaactggtgatgcagaggagaaagtgaataacagaaagggaaatctttgagaggattaaagggaatgggatccagagtacttgctttgagactgaccatagacaggaggagagatgctttctccagtgaaatgcgaggaaggagaagacaggtagagatgcagaaaagactggtagatttagtcgggggacgatgtgagatcttctgtgtaacctcttttgttttctctgtgaaatatgaggaaaggcatcagctaaaaatgagagaggactggaggcagagggtgggatgagaaagcttggggaatgaggaaaagatgagtgtcactactcagagtagcagagcaaatttcttggaaaaaagtgccacaatggcagttcagtgtccttttaaatgcggtgatcgcacttttactgcgtcaacagtttgccttcttgtgtggtaatttcaataacacgcagctgagcaagtaaaggcatggcgaatacaggtgcatttggtagagatagagaaaggcaacgaagttaaggggatttgcaaggaggtaattataatgatgcctcattgaattcaagctagatgggggagggtgggaggtaaaggcaaacatgtgctcaaggataggcagtggtaagatggatgctttggggttcttgataaggtcaaagattattctggtggctgtacttgagcagagaaagttcatctccaaagaaagaaagtttactgatgatgagcagttcagggaatgaagaggccagttgtttgatgggttatccacatattctggatcactacagtcatctcttttttttttctttttctttttctctgacctcattcttccatcacaattagtttctttcttaattaagctctttggcatttgccctgttccaatctatttgacactgcactttcagccccaatttgaaaattctaagtgacttcccactgtatactgaaccaaggagtgaacttataaaaaaaaacttaaatttatttgaaattcaccatgtgtcatgtagcacactaaatgccttctctggattatctcatttaatcctaacaaccaccctatgaggtagatactgctgtcattatcttcatttacaagcaaggaaactgaagcagagaaaagttaagtaatttgtgaaaggtcacttagcagtagcggagtcagcatttaaactcagtatgtgctttcccccactgccacaccacctggcactaggagccctccagagtatgacttctactttgctttcctgctttgtccctcattattggaagtgcttgaggagagaccagaaatcaagtagaagttgggctgcaacttgctgggaatgttgccaagtacttgctgctccttcccatggaataccttttccctctcagccaaaatcctatcagtcctggaaggtccttgatgaacctgaaaggtcccatcttctccataggattcccctccttatgaaccccaaaccctcccaaacacagagccctgggatcttttctttctctgaacctccatagcattttatccaaattcctctaatgtcatctcttttacatcagattacacatgtgcttatctccaccgttagattcttgccttcagtggaagtagggacttaacgttcttttcccttaggtgaactcagcatgcattgcagggcagtaggaagccaatgcaggtttgttgattaattttggatgcaaaggaaggaagtgattggtccaagtatatatttcgagatattggagcatcgggaccagaatccagttctgtaaactttgaagccaacactttctccacattgctccctttttacctcttggttctgattccatttccttccgtacttttgtccctgaaaatatacatgcacttggaagcttcttgactttctctcagcccagatgcaagagaaaaccttcacccatggacagatggacacacacacacatacacacacacacacacacagagctctgattcacctaaggacccagctttgcttctttacccaataacagcacccacaaatctttatctaccctagcccacactttgcctccactacggaagctcttttcttaacccagtggcatccccctacccctgcatgaagtcacagatctagtgcccttttgcagtctcttcttccttttatcagatatttctaatagcaaaaatctggaagacctaaatgccaagcaaaagagttgttaaataaatcacaggacagccaaatagtaggatatagtgtagccatttaaaatgacaacatgggcggggaacggtggctcacacctgtaatcccagaattttgggaggctgaggtgggtagatcacttgaggtcaggagttccagaccagcctggccaacatggtgaaaccccttctctactaaaaatacaaaacttagctgggtgtggtggcgcgggcctgtaatcccagctcttgggaggctgaggcaggtgaatcacttgaacctaggaggcggaggttgcagtgagccaagatcgcgttattgcactccagcctggtgacagagtgagaccctgtccccccacaaaatgaaataaaataaaataaaatgacaacatagaaacagattcatcttctagaacttgcattgctcagtgaaaaatcaggttaaagaacagtttttagagtatatcctcatttacacttatgtatgtctgtatgtgaacagcgtgtgtctgtgtgtgatcacagaaagaaatccaacaggatgtatgccaaggtgataatattttgctcctgcgtattttctatttttctgtagtgatcatggattacctgtgcaatttctaccccctcccaacaaaagaacaaatcttgctctcaggataaactctggcaaaattatttatactgatgcataaatcatatgtaaagcccaacagagacctctttccagaggcatatttattttaatcagtcaagaggggtaagccaaaggaaaatgccacaaaacaggtggaagagggtgttatatacttttatttcatttttgtatgttactgggagttctcagtccttttaaaagtgcagctcatccaggcagtcccaggggatatggccacgagggctgtgctgtaggtgaagggcgctctgggcctgggcagtctctgggccaaagtgggcaggtgtcagttcagacactccactgtgggctgatctttgctttctgtcttacagctcctgttgctgggacacctggtaagtactccacccacagcctttccttccctcgggtccccttttcctctcctcccagtgccctgtctggaggtgctctaaatgcaccagcaactgagcccagtaccaagtcagggccaggaaagggtaattgctcccgaaagatcccctctccctcttccactctcctccttccttttcctccttccacggaggcaagtggtaggcagccacggtgttcaaatgggggagctgtcacagaaaatgagaactctgatctctctctcaactgccttccgctgtccaaataaaaccaagggcttcctctctccaaataaaattcaggcacatgcaaaatcacatggcctgcatatgttgtccccctgtgttgctaaatccttgactgtgcatgtttctgagagctccaaggcctgttccctgacagagtggtctctgcatacctctggctacactttgccgggcacttctgtgtttgtgccactcagcctccaccgctccaggactggccctccggcttttctccctctctctttatccttctgaggccagagaggctcgtgtatgcttgggtgtgaggacgggccatcttgacctcgtttttaaagtatacagaatgacattaggtcagaacggaaacctgatatccaactcccatgcctgccatctccaccagagcccccacttatcttcagccagccccaggggaaatttatccactagtgtctaaatgcctttgtttatcggggagaaaagttagtctcgaaagagtatgtatgtatggggtgtctgtgtgtctgtgctggtggggagaggttggtggggagagagagaaagaactggtgaggatatctcaggtaaagtatatgtatttcgagggtgtttctcttgcctgctccctccttcttccctgttgccctgtcggagtcctgggctccctggggccgttgtggtgggatgtatgagcaaaagcaactgccttcagttgcagaaccattctgggcctggctcggcttttggtgcccctagtaggcctacaggtgcttttttgtctgagattcagggcctctcaagctcctgggcttcctcttcttcatgctacctcctctctctgcccctcagcagctcccccaaaggctgtgctgaaactcgagccccagtggatcaacgtgctccaggaggactctgtgactctgacatgccgggggactcacagccctgagagcgactccattcagtggttccacaatgggaatctcattcccacccacacgcagcccagctacaggttcaaggccaacaacaatgacagcggggagtacacgtgccagactggccagaccagcctcagcgaccctgtgcatctgactgtgctttctggtcagtggaggaaggccccagggtggacctgggagggccaggacggatgaaatctgctttcaggcagaggtttgcaggaaaggggggtggcctgcttactgggaagtatcgctgtgagttgcctcagcacatatcagtggttgtttttgcctcagttctgattgaacagaagaaggtttcaaggccaaaaacaggcagccaagtgtgagagaagcagaaggaaatccctactgcataaaacccatttccattttaatggcagaattgaaaagcacagaccacaactgaatcctagccctggaaatgactcactatacaacatgatgaattcatttaacccttgagtttccatttcttcacctgctccgtggggcactaacgcctccctcagaggcttctggtgagaatcagtgtttccctgcccccgccccgccctccatgccccttctccacgttctcactgtgctaggtgctcttctctgtctttctcttccaccagcctgtgggaaacctgagatgaaagtcgtgtcttacccatctttgtatttccagcatctgaaactgggcagagcttaataaatattttgctggagaggttgatgatcttacaaagctcccattgaaaggtggctctctgtaaagcaaagttacaatgagattgtgatgaacattgtccttgtggcttttcacttagtcccctcccttcacctgaagagcaaattttcctcaaaagtacacagcaaacgaatgacccactggtgacactgttgcctttagaccctgctggaaagaagctccacatttattaacattcccgaagtaaatttatcaggtagcattcatcaggtaacatttgttgcacattcatgacttttctactgtccacaaaggcatatgtccttatcatatgcggactcctcggtcacactggattcttccttccctcctcgacatggaagagatggcatcttagggtctcttgtgttcttcctgcagaggcctgtcgggcaggaaaaggctgcagctgccttcctgggagaaggaggagatgagtgtatcctgaacacctattatgtgctaggggctattgtagatacatgacactatcatgctcattttcacgaatgaggaaactgaggctcagaagacttaaattatttgcccaagagttcataaatgacagagccagcattagagtccaggactgtctgatttcagacctaagctgttccctctgcacatcgtgtcccaccagtaaggaagatctgggtctcagagctgagccaagacctcccgggtcctctgcggttttttgtgtctttcagagtggctggtgctccagacccctcacctggagttccaggagggagaaaccatcgtgctgaggtgccacagctggaaggacaagcctctggtcaaggtcacattcttccagaatggaaaatccaagaaattttcccgttcggatcccaacttctccatcccacaagcaaaccacagtcacagtggtgattaccactgcacaggaaacataggctacacgctgtactcatccaagcctgtgaccatcactgtccaaggtatgcggagtctgccaagatgtaaggaggggagaagaggggatggacaagggctgaggtcacatgggcctacatggaggtctgagaaaggccacagcgcaaaattgggcactggagcaaagaggagtggtgtggaggcctggctaagtattgaccaatgagcaggagtaggggccagagcttggagccctcaggtgataggtgaccaggctgttgttccactttgaaatgcaggccccagactaaggacggcagcgaagcagagctccctcgttggtgcagaggttccctaagctcctgggcattcctaagaactgaggtttgcctttattcttctcatggctcatgttacagccattcactccagaaagcctggcacgtcatggaccgttcaaggctgtgctccatagagtaatgatgcctccagctatgcgaggctttgggcccacccttcccactgcccctgagggctaaggggagcccttccttctgctcctgcctgctcaccagtgtgcctttattagttcggtggagaaacctcggtaagcaggaggcataagtccagccacagaaaccctgtgcagatgaggctggggatgtagtgagtgctgcagaagtgagtgactcagacacagaagagcttcgggtgacaagcactaggacatagcattggatgggggggaggtgggacaaggagagtactgcctgtcctgatgtctgtcttccctagctcccagctcttcaccgatggggatcattgtggctgtggtcactgggattgctgtagcggccattgttgctgctgtagtggccttgatctactgcaggaaaaagcggatttcaggtttgtagctcctcccggtcccttttgttatcagtttccacttggcccaggccctaaccccagacattgccagaatccctctctttgggctagatacacattcagatctaggcccgtattgtattatagtcattcattcgtttattagatcattcatttgacaagacttgaacaaactagcttatgtgtcagccaatgcgtgagacatggtgggtgatgccaagagaagtccagtccctgcccttggggagttctcagcattgtgaggaagacagggtcattataataagatgggataagagcaatgatagggacatgaaaagcctaggatagaagtacagaggaggctccatagcccaacaagggctgaggcagttggagaaggtcttggggagagcagtgtagtgtagtgatggagtgcacatagtggggccagactgccttggttcaaatctagttctacagcataccaactatatgacccaagtgagtcactccacctctctgtgcctcagctgtctcatgtggaaaatggggacactaataggacttacctcagagggttgccatggggatgaaagaggctgatgctcttacacagtgcctggtaggcagtaacagcacacaaacagggctgttgccattctggaggaggtggtgtgtgagggcagcgcttagctagggaaggaggaccctccaggcactgggccaaggcagggattgaagccgggtggggctcatatgggtgtcgaagggggagtagagagggtactgcaagccaccaagaaagaaagaatcccgctaacacctcacaaagcacttttcaattggttcatagccaacacctcagttactgatgataagtaaatacagagaaacagagagagagagactgagacacaggggtgtttttaaaaggcagagcaagcctcagacagatgccatggcgtggactttctgacactcctgggcatccccatgggtgagctgaattctgcctctggaccagcccttttccaggcgggagcagcctctgagcaggggagctgggggtgggaggacaggaaacatctgccagagtgaaggcctgagctggtcccatccaaccctggccctggtccttggtcctgaggactcaggccccaccgcctaatcctactaacctcctgtgtgcccctcccagctctcccaggataccctgagtgcagggaaatgggagagaccctccctgagaaaccaggtgagtacaggttgtctcagggattcagtgatggctcaccagggctgccggctggactggagccagggagaaggggcttgtgcaagttcagctgggagccagggagggagcagcagtgggaggatggctggggctcaaatcgcttggtcagctctgagtctaactcctgggcctaaagacgacctctctggagatgagaagagaaacaccagtcccagatacagaagagagggctgtgtccgaatttctggtaccaggaatctggtgatatttccagagcaagaaatcagagatactttggtctttctgtggagctttggcagagctggcaaaggatggggttaggggctgtaagactgaggccaatcggacgtgggaggcaggagtctaaggggaaaggaggaggaggcctggaaaccccttgatttgctgaggaatctgcctctgtggagggatggggtggagtggccaggctcagctgtctgtggaacactaggaggaggtttgggcttgagaaaattctgggggactaggggcactagtgggctctactctgtgggcaaaactcagttctgatgcccatgcactcaaggttgactgaattttggcctggttctgccctcatcacacagtggagccctgagcaagtcagtctccctgatggggttcagtctcctcactgaggaaatgagtgggtggccagggtgacctctcaggtcttctagatttgacattctgagaaccaggggccacccaagccctggcccaggtgggagtgtgtaaaggaacttccaggaggatgccaggcaacttccagactgtagttaaagtcagagcacaaaggaaaccagtgctttctctgggggcttccatgacagtaagaacaggcagaaaaaagaggctgtcaaagaccccacctcagatggctggagtatgattcagagcagagccaacagatttaagagcttgagcaaaatatcacttgttcagctgtgcttgcagcaaggtcgcatgtctgctggccaggcccagtggtgataggggcctgtgttcacaccagggccaaaacagatctggaaaaaacaaagtccaagcaactggattatccatcttgttgtgtggttctgtctgcactggcataagcacatttcacaaggcacttttgcagccaggcattggggctgcataaatggttttttaaaaatcctttcccaaaaggcaaagctgggttgctgggattcttgggaaatgtaatagaatgggaattcagaatgcggtttactgcagaatttacagcatggcaataaaggctctctatgttcagggggtgagagaagagactagatgcattgtctcagatgtctcctgacttcctgagaaatgccactttgcagatatggggctgcttttcacactggctaagtcagttcatggcaaaatatgagggaattcagtgtgtttcagacactaaccaaagtccatccttcctttctccttccgtccctcccttcctccctttctcactcactctctctttctttttaatgccatggagtaccatatttttcaaagttccaacaaagatgcactacatttagacaatgtggaaatggccctcagccttctctccctgaagtctgtggccagcaaaaatctggactttacttcactctgatgctgaacacccccctcccccacctcttccccaatatctcagatcccaagcctccctggtttgcttctaggaaagctcagcaattccctgaaaagaatgcagctcaagtgactgctccactttttcaccttggcctttgcggaaggctgtggctgggctaccctatgcatcgatcaatgaggtcatatttacccagtgcttggcctagaggcccaagacagggtcagcagtgcttgctttggctctagtttgggcgttggttttgcagcctcagcatcagcacaggcaggccctcttctccagcagtgctctggctgatatttcttctttttcccacagccaatcccactaatcctgatgaggctgacaaagttggggtgagtgatcccagccatctccccctcccttctcccctgttgccttttctgttgccttctttcctaggccctctctgtggatccttactgctggtttctgccttctctaggctgagaacacaatcacctattcacttctcatgcacccggatgctctggaagagcctgatgaccagaaccgtatttagtctccattgtcttgcattgggatttgagaagaaaatcagagagggaagatctggtatttcctggcctaaattccccttggggaggacagggagatgctgcagttccaaaagagaaggtttcttccagagtcatctacctgagtcctgaagctccctgtcctgaaagccacagacaatatggtcccaaatgaccgactgcaccttctgtgcttcagctcttcttgacatcaaggctcttccgttccacatccacacagccaatccaattaatcaaaccactgttattaacagataatagcaacttgggaaatgcttatgttacaggttacgtgagaacaatcatgtaaatctatatgatttcagaaatgttaaaatagactaacctctaccagcacattaaaagtgattgtttctgggtgataaaattattgatgatttttattttctttatttttctataaagatcatatattacttttataataaaacattataaaaacaacattctgtttaccttttcaaggctgtattggttggagtgtagactgaactgcctggggtctgtttctcttcagtgatgagactcttaggaaggcaggaatggataggatagggggaggagaggagagatggggatttagaatgtagagtgagtgccccttttcttaaaactgaatacagtcacgcaccacataatgatgtttagttcaacaacagactgcatatatgatggtgatcccataaaattataataccatatttctattgtaccttttctattcctatgtttagatatatgagtacttaccattgtgttacaattgcctaaagtattcagtacagtagcatgctgtacaggtttgtagcctaggggcaataggctatacgctacagcctaggtgtgtagtaggccacaccatttaggtttgtataagtacctgctatgatgttcacacaacaaaattgcctgcatttctcaaaatgtatccccatatttcaacaatgcatgactgtactcttctgccaatgaccttgtattcttgtttccatgtcttcttctctttcctcctatggcaaataaaacactgttttgcaacacaagttcacgggaagtcaaacttcagatgagccctgagtggagattgctgacatgtcctgctctgctattctcccaatgtagttaccagaaggatgtgaccttctcagagaagtcatctcaggcagattagaaacatgactggcagtctccttgagggtttggtgagtgcccttggagaggcttcattttcctgggactctacgcagtaacatcgtgcaacatttgttgcactttttatggtaggataaaaagtactcactttttatggtcccacaatcagatttcatacacacttattgttttagtaataagggataataattaaaattactgcgttattaaggacttactttgtgccatatagtttgtgccaaactatatgctttagaatttagagaatttacgattagccttttatatttcctcttttgtgagtttcctgtgtatttattctttgcccatttttgtagatacaatgtatgtccctttatttataaattgcatagtagtaacttatttccttttatttatatgtaaattatttcactacactaataatgtattctttttataaaattaagatacagatagggaaaacaaaaaaattagatcgcccataaatccataaaccagaaataattaatgctaacatttaaggatatcaatccatattcctgtctgtggcagtgtgtatttgtgttttaaaaattggatctaatcccagctactcgagaggctgagacaggagaatcgcttgaacctgggaagcagaggttgcagcgagctgagatcgcaccattgcacttcagcctgggcaacaagagtgaaactctgtctcaaaaaaaaaaaaaaattggatcatatcatatattttacatgttaataaatacactcaggcaaaaatgtatgctcattgtaagcatgtaagcccaaataatacagaaagataaggagtaaaaagtagaagttccattttgtcatcagttccctctatcctcttcccttttctttctttctttttttttttttttaagagatagggttgtagtccaggctggagtgcagtggcaggatcacagctcattgcagcctcaaactcctgggctcaagtggtcttcccacctcagccttcctagtagctgggactaccacacctggctaatttttaagaattttttggccgggcatggtggctcacgcctgtaatcccagcactttgggaggccgaggcgggtggatcatgatgtcaggagatcgagaccatcctggctaacacagtgaaaccccgtctctactaaaaaaaatacaaaaaaaaaaaaattagctgggcttggtggcgggtgcctgtatcccagctactcgggaggctgaggcaggagaaggcgtgaacccgggaggcagagcttgtagtgagccaagattgcaccactgcactccagcctgggcgacagagactccgtctcaaaaaaaaaaaaaaaaaaagaactttttggctgggcgcggtggctcatgcctgtaatcccagcactttgggaggcaaaggtgggtggatcacctgaggtcaggagttcaagaccagcctggctaaaatggtgaagctccatctctgctgaaaatacaaaaattagctgggtgtggtggctcatgactgtttagtcccagctacttgggaagctgaggcacgagaattgcttgaacctgggaggcgaaggttgcagtgagccgagatcatgccattgcactccagcctggggaacagagagagactcggtctcaaaaaaaaaaaaatagtttgtagagacggggttttgctatgttgtctaggctgatctcaaactgtgagcctcaggcgatcctccccacttagcctcccaaagtggtgggattacaggtgtgagccacggtgcctggccctgacatgctacctaaagtctgaaacttgactcctgatccccagggtcagtttctttactgatagtttttcaataagccatttagatagttggcatgattacgtagccagagggggcataaaaatccctctaggaacttctgctttgagctctcccatagccaagattccttgtatggatcccggtggtttaatccagacaaaaagcgtaaataagttacggtaactataaggatgctagggagcttgcacatggaatctcttggactcccagtaattgcctagactttctttctcttgctatacttttaaataagcactttgtttgagcatgctcggtagagtttgatgagttctttcaaatatcctcttcaggaaggacatccctgactgcacttcccctactgctattcctctgctcttatttccttcatggtatctatcactgtatgtaatcatgcatttttttgcttaaatatttacttacaagttctaaaatgtaagctcactctgggcaggatgtttgtattattcactggtgtattccagagactagaacaatgcaatcactatttattgaatgagttaacgaatgaaataatattatatttatctaaaactcttaaatgctttaaatagatctttactatatttggaacttatttttggacttggtgtaaggtgagaacctaatataatttttccacatgaaagtcagttgttccaatatcatttgttgaacagtttaataatttgaaatcctaatttatcacctaaattcccactcataggtctatttttagcctctcttctattacattgttctatttgtctatttctgcatcaataccacatttttagttattgcaactttatagtgtactttgatatatagaaggtcaagttttctctcattcttttgtttcaaggttttcttggctactaatgtgctgcttctcttccagatgtacttaagaattccataacactattatgatattggtagaattgcattgcatttatagattatttgggtaaggtttgacatctgtgtcatattgaggcttcctaagttacaactcttcattcattcagacttacagaattttcctataatatcatatgagcttggcacatttttttgtgacagatctttgacagacttttctttctgtcatttttggtctggttatgattttctctctctcgggagtcaattttgaaaacttttgctttcctaggaatcatccattttattggtatgcagtggtacatcgcacttttcccctattttttggtaataagttgtgtgtttgtgtttatgtccctcctctcattcctaggttttgggttttctttcttttatcagttaggatgacttcagttggaaataacaggaaatcgtgattcaaattggcttaaacattaaggaaatgtattatctcacataacaaaaagtccagagacagacagtttctagcacatcagaactcttggtccacttttctacaattctgtgagcactgcccttgagctagcagcaagatgattataacggttctaagcagcatcatacccagaccactatagaaagaaagggactaactattccttttatgtgtagcctttttttttttttttgagacagagttgcagtggcgcaatttccatttactgcaatctctgccttctgggttcaagcaattttcctgcctcagcctcctgaatagctgggattaaggcatgcgccaccacacccagataatttttgtattttttagtagagaccagccaggctggtctcaaactcctgacctcaggtgatccacctgcctcggcctcccaaagtgctgggattataggcgtgagccactgtgcctggccttgtgtctctttttgacaatgaggaacattttctcagaagttctgcaaccatcttcccatcatatcatattggtcacgactgggtcacatgctcattcttaaaaccatcacgagaaaggggactgagatgaccataattcacttagcttaatcatttggagagtcacccatcctgacactatctctttgttcatcctaatcagacttaccaaaggtttgctttattagtcttgtatcagcttttgacttctggctcaagtactttgccttttgcttgttttctaatgtattatttctttcttagatttcatttatatttactgtattattcattaatttctaaacttcttgttttgaaatagattcacaaaaggctataccttttcctcttctgccattttgaccacacccattagattttgagatatatgtatccctgtcattgttgtttctaaacagtctgtaattttagttttattttcttcttaactcaaactttatttggaagggcgttttgttgtgtttgttttgttcaagagaaatgagcgctaccttttttgttttctattttattgcgggacggtcagtaaatgtggtctgtatgatttttctgtatgtgagtatctttaagtatatgtatgaagacaatattttctttcattttaaaataaagttttgttttttattatggcaacacacacccttagtttacatagtataatggaatagaaggcatataacaagaaatagctgtttattgccccttccctcacatctcagctctacttctcagaggcaaccatgttcaattctttcaactatgtcttctgctaatttacctccatatttccaaacaagacaatacgctgctatttcttgatttttcaatattagacattatctatttgatttcctactatagaatacaaggactattcttattataccgtgcttacttacttcccacttttcctaccatgtgctccaacatagctttatcacaatttatgattactccttgttgctgagacaaatagtgttgtctgcttatatttcccttcttgaacaatctttttttcctctagatataataaatgcctcattttcatatattttttagttgtctatgtgtttattagcttttccaaagatttaaaaaaagttctaaagcagcttaatactattttccatagtagtcaaatgcaccatgtagcttttcagtttttcttccttctttttttttttttccattagcaagatgtccctccttttttgacactgttttcggtcatttgatctctggacctcttgcacagctgttgtcctaggacttctctatcttttatatgaaatcctgtttcctgaatcttatgtcttcctatttcttggtttcttccttgtgtggctgcagcatgtttgccagggcatcctgagaaagggtttgcaggtgatatagtggaggccataatgcctcacctcatactcactcaactcacctgaattcacctgcagctgctggctgggtcaatttctcctgagaattaaactatgacagggaaaaattagtcacctgcaaatagtcaccctgggtaggagagaggccctaagagtctaacttctccttatacagagtttacaattatcctctcatttttagaatcattctttaaccatatattttgttgtacatgattcctccaaattcctggactttttctaagatcttccaggaaaattagcttgcttttcattagcattcctttctttagggaaataaactcaattccctattacccaattttctataacaacatgaccaagatttgtggttatcccaatgttacttcttagatattagacaaaaataatgttaaatggttaaataaaagagacatctttatatctctgtttatcttaattaggcttgtcagaagtcttttttattggtcttttcacagaattagtttttgattgtttgatcacatcttccttctgtttgcaatcttgtacattgtaatctcttctattttgtaacattcttagtcttgaataatacaaaaaaaagtatatattttccctaccacactagtctctctgtttactgtactcctgtgcccactggaatgaaatgttccttaatttttctatttttgctgaaaaccacaatttcaacagataatttaaattatacaaattgttatctcaacaagattacttaagacttgtcaaacacattgtagcatacatttctgtaactgttgttagccaaataattaaactcttcaatctgcgatttctacatatccaacgagaacctatgtcttttttttttttgaaggcaattttataactttatttgatgtatttgacgatcagcgattagttctcatccacattgactgtagattttcaaaagtggcaacaggtacataggtaaccaaagtgtagagcttatttggtgaatcttcatcctcattacgttttcgggacagccgcacacggattcggtatgggacattcttattcctttggcccagacagctttgttgagcctgatatcaatgcgcgcatctggagttcccatctccttcatggcaaatttccgaagctctttgagtgcccgaggggcacacttcttgaagcccactccatggatgtgcttgtgaatgttgatggtgtattctcgggtcaccacctcgttgatggcagaacggcccttttattcttgccacccttctttgcgggagccattctgccgggtccaagttggaaaggaagagcgcgagggattgagggagaaggaaagccgagaatctatgtcatttaatagatcatgctttgggtgtcaagtctaagaattctttggctagtcctacgtcccaaagaatatgttctccagttttgttttgtttttttaagttttatagttttactttccacatttaaacccaggatcacccaggcacagtggctcacacctgtaatcccagcactttgggaggccaaggcaggaggattgcttaaatccaggagtttgagaccagcctgggcagcatagtgaggcttggcctctaaaaaaaaaaaagttacctgtgaagtctcagctacttggaaggctgaggtcggagggtcggagggttgcttgagtacaggaggtcaaggctacagtgagctatgattgcaccactgcactccagcgtgggcaacagagtgagaccttatctcaaaaatgtacatgaattagtaagtacataaacccaggatccactttgagtttattttttatgagctatggtacttaagttaaagtttatttttttttcctatggatgaccaattgctccaacaatcatttgttgaaaaggccatctttcctcattgaattggttttgcacctttgtcaataatcagttgggtgtatttgggtgggcctatttcctgttctctattctgtcccattattctgtgtctatcactctgccaataccacacaatcttgattattgtagctacattgtaagttttaaaattggttagactgattcctcccaatattcttcttttttcaagatttttaagctattctagttcctttgtctttccatatacatttaaaaataatattgcctgcatctataaaaaatcacgctaggattttgacaagaattgtgttaaaggtgtacattagtttgggaagaattgacttctttactatattaagttttccaatccataaacacgatatgcctctccatttatttagatttttacaaactttccttcatcagtgttgtgtagtttttgtcatacaaaacctatacatgttttgttagatttatacctatttcttttttcttcttagtattgtaattgtaaatgatactattttaaatttcagagtccacatgttcattgccaatatgtagaaatacaattgattttttatcttgtatgtttatcttgtatgttgcaaccttgctgaagactcacttattagttctaggagtttttaatgtattcttgggattttctaggtagacaatcacatcatatataagcaggggcattttatttctttctttcctacccatatgccttttattttcttctcttatcttagtgaactggctagaacttccagcattatgttgaataagagtggtactagcagacatctttactttgttttgattttagggggaaagcatgcagtctttcattgttgagtatgttgttagccaaaagtctgtgtagatgctctttatcaagttgaggaagtttccctctatgccctctcctttttgcttgtttctttttttaatttttttttagactttccatcaggaataggtgttaattttgttgatttttttgcattgattgacaggattttttatggtttgacatgatttttgatgtgatttttcttctttagcatgttaacatgatggattacattgattgattttgaaatattgaaccagtcttgcattccaggaataaaccccacttggtcatggtgtataattctttttatatgttactaaattctatttgctaatatttggtttagtatttttgcacctatagtcatgaaaaatattagtctgtagttttcttgtgtgtgtgtgtgtgtgtgtgtgtgtgtctgtgtgtgtgtattaaacctgtatgtgtctttagcccaagatatgatatgtccatcttggtatatgtgtcatgggcacttagaaagaatgtgtagtctttgtctggctttggtatcaggataaactaactttgtaaaatgaattggaatgtgttccttcctattctatattctgaaaaacattgtatagaattggctaattccttagccgggcgcggtggcgggtgcctgtagtcccagctactcgggaggctgaggcaggagaatggcgtgaacccgggaagcggagcttgcagtgagccgagattgcgccactgcagtccgcagtccagcctgggcgacagagcgagactccgtctcaaaaaaaaaaaaaaaaaaaaaagaattggctaattcttcttcaaatgtttggcagaattcaccagtaaaaccatctaggactggagatttctttttggggagttttaaaattatgaattcaatttcccttataattacacagctacacaagaatccatttcattctggatgaactgtggcagtttgtgctttttgaggaattatttcatctaagttggcaaatttatgtgtttaaaattataggccaggcacagtggctcatgactgtaatcctagcaccttgggaggccgagatgggaaaactgcttgaggccaggagtttgacaccagctttggcaacatagtgagattcccatctctattttttaaaaaataaatatgggccaggagcagtggctcactcctgtaatcctagcactttcagaggctgaggcaggcagatcacctgaggtcaggagtttgagaccagcctgactaacatggtgaaaccctgcctctactgaaaataccaaaattagcctggtatggtggggtttgcctgtagttccagctacttgggaggctgaggcaggagaatcacttgaacctgggaggcggaggctgtagtgagctaagatcacaccactgcactctgcctgggtgacagagggatactctgtctaaaaaagtaataataaaaatatatataataaaaataaatacataaaattatagtattcccttattctccttttgatatctgctggtttattggtaacttgtatctttgctctgtcagtcttgcttgaggtttgtcaattttatcttttcaatgaagatcaattttctctatttcttatttattttctctattgtttttctgtcatcaatttcactgttttgtgtgcttatctttattcttgcctcccttctgcttgctttgggtttattttgctcttctttttttagattcttgaggtgggagcttagattattgatttgagatttttctctatgcaattagtgctataaatttccattccaatactgttttaattgtgtcccacaaatttttatatgtcgtattttcatttttattccatttagtgtattttattttatttcccttgagacttcctctttgacccatggattatgcagaagtatgttgtttggtttccaggtacttagagacgttcctgttatctttctgttatt

SEQ ID NO: 1190 - DNA, 1443 bp, Homo sapiens
ccgccaagctttgagagaaggctgtgactgctgtgctctgggcgccagctcgctccagggagtgatgggaatcctgtcattcttacctgtccttgccactgagagtgactgggctgactgcaagtccccccagccttggggtcatatgcttctgtggacagctgtgctattcctggctcctgttgctgggacacctgcagctcccccaaaggctgtgctgaaactcgagccccagtggatcaacgtgctccaggaggactctgtgactctgacatgccgggggactcacagccctgagagcgactccattcagtggttccacaatgggaatctcattcccacccacacgcagcccagctacaggttcaaggccaacaacaatgacagcggggagtacacgtgccagactggccagaccagcctcagcgaccctgtgcatctgactgtgctttctgagtggctggtgctccagacccctcacctggagttccaggagggagaaaccatcgtgctgaggtgccacagctggaaggacaagcctctggtcaaggtcacattcttccagaatggaaaatccaagaaattttcccgttcggatcccaacttctccatcccacaagcaaaccacagtcacagtggtgattaccactgcacaggaaacataggctacacgctgtactcatccaagcctgtgaccatcactgtccaagctcccagctcttcaccgatggggatcattgtggctgtggtcactgggattgctgtagcggccattgttgctgctgtagtggccttgatctactgcaggaaaaagcggatttcagccaatcccactaatcctgatgaggctgacaaagttggggctgagaacacaatcacctattcacttctcatgcacccggatgctctggaagagcctgatgaccagaaccgtatttagtctccattgtcttgcattgggatttgagaagaaaatcagagagggaagatctggtatttcctggcctaaattccccttggggaggacagggagatgctgcagttccaaaagagaaggtttcttccagagtcatctacctgagtcctgaagctccctgtcctgaaagccacagacaatatggtcccaaatgaccgactgcaccttctgtgcttcagctcttcttgacatcaaggctcttccgttccacatccacacagccaatccaattaatcaaaccactgttattaacagataatagcaacttgggaaatgcttatgttacaggttacgtgagaacaatcatgtaaatctatatgatttcagaaatgttaaaatagactaacctctaccagcacattaaaagtgattgtttctgggtgataaaattattgatgatttttattttctttatttttctataaagatcatatattacttttataataaaacattataaaaacaac

SEQ ID NO: 1191 - protein, 291 aa, Homo sapiens
MGILSFLPVLATESDWADCKSPQPWGHMLLWTAVLFLAPVAGTPAAPPKAVLKLEPQWINVLQEDSVTLTCRGTHSPESDSIQWFHNGNLIPTHTQPSYRFKANNNDSGEYTCQTGQTSLSDPVHLTVLSEWLVLQTPHLEFQEGETIVLRCHSWKDKPLVKVTFFQNGKSKKFSRSDPNFSIPQANHSHSGDYHCTGNIGYTLYSSKPVTITVQAPSSSPMGIIVAVVTGIAVAAIVAAVVALIYCRKKRISANPTNPDEADKVGAENTITYSLLMHPDALEEPDDQNRI

SEQ ID NO: 1192 - DNA, 47686 bp, Mus musculus
  misc_feature (1)...(47686): n = A,T,C or G
aaagcttttattgttttgtaaatgagagcaataagttttctagtatcagcttgtaactgaacaataccaaacaattaccaacaaaaaattaccaaaagttatttatttgtatgtgccgttaaaattggggcctatgctgtttaatattttaaaaaatgagatgaaataccatgtgaatatacaattttctgtgagtgatagaaatctgacagctaatgaatccttactataatcacaattaatgagtaaatattttactgttttttatgtctcctttttagcaattattatacaaagacaagacccaaagaaggagctcttcatttagaaacacgagaagtatattctattgatccatataacccagcaagctgatgacatgacaagttggtatataatgaaattgaaatatagtttcttatacataggtcaagatttgctttaatattttctcatagtatttttaaatcatggccttaaggaaatattattctttttcagtctttatatccatgaacaatattattagcttacctacttcatattccaactgacaatcttatttaaacaagcatttttctattcagtatatatgtaacaaatgtaattaataaaatgattaagaataatttaaaattattaaaaataaaataaagtcagatacggtggtatgtacctataattctagtacttaggaagtgggagaaagatcaggaatttaaggctgacatttgaatttagctatatagtgaattggaggggagagtggactgtatgaggctctgtctccaaaaaacaatcaaaaacagaaacaaaactaagagaaaatgagtaagaataaatattattaaagagaaataagcaaggaaagatgatagagaaaagaaagtgattacattgaaagtattcaccatgaaaatggcatttaagtttagttatttctttagaagttttctcataagcttcagctctttataaaattccatttagtaatagacacattcaccattcaaataaactgtatttttaaaaatcttacatgattttgtctttctgaagtcagtgatttcctaaatagaatatacaattctagggtcttaggagtttataatttaatggtaattcattctagaacacacctttggttattttagccaatttctccatctacaaatttagctccctcaaccccaaaacttaaatattactcagggaacaacttctctcagaccacccatcctctctcactatgccttagatctaacctttagactattaagataaaaaaacaaaaacaccaacagaaacccctcccattgagaaccagctttctgtctcatctgttatgtaattaaactcgtgtgtgtgtgtgtgtgtgtgtgtgtgtgtgtgtgtgtgtgtgtgtgtgtgtgtggcatgtagggacagttaaaaatcacatggagggatggaaagatgtctcaacagttagaaacacctgctggtcttccagaggacctagggttgggtttaattcttagcacctacatggcagcttacaactatataaaattccaattccagggaattagcctcctctggtgactatgggtaccaggtacacataaggtgcacaaacatacatgaacgcaaaatagcctgtagttgtttgaataaaaatggtcactattaggcccatagagagtagcactattagaaggctgttgtagtagttatggccttgttggagaaagtatgtctcattctcttctttttttgttgcctgcagatcaagatgtagaactctcagctacctcttcagcaccatatctgcttacatgccaccaagctaccctccacgacaataatggactaaacctctgatttgtaagccagccccaattaaatgtttttctctataagagttgtcaaagttatggtgtctcttcacagcaatagaaacccaaaataagacagaagttgaaactagggactggggtattgttgtgatagacctgaccatgcttttgtttggagacatgtggactttgggtttggaaagcagtggaatgctttaagcacagtttaatagaccaccctagaaggagcacagaagacaatgatgtttagggtgatttgaactatgagggcctggttcaagaggtttcagataagaagaactttagtatgtggcctacagattgttcttgtgatatttcagagaaggtagtggctgctctctgctcttgtcaaaaaaaaaaaaaaaaaaattgcccatggctaaatggaagagtttggataaattttatgttggcaaaggagatctcagaacagtctagattgactctgttgtgcagttactagtggtcacttttatgcagacctataactaataggagcaagctgagcaaggaaaaatacaaaatgtaacatttgaggagaaaaggaacacggaaagtgtcaacagtttaaaggaaagcaagaccctacctaactaagcttcctgtttgtaaaaaagaattaaagaaaagtgaaagggaattaaagaaacgtttagggcaaagcatggtagtgtacacttttaatcccagagtttaaggttagcctggtctgcaaagcaagttgcaggacagccatgcttatgcaatgaagaaagtttctaaaacagaaagatagtgaaaaattatttgaatgagggccccagccaacaacatatcatggtggctttggctatgtggttctggctgtaaagtcaaggatacaagaaaggggtcatggactcttctgttgtggctaggaaaagctaaagaggccagacatgtgtcaggagtgtccctgcatggagacctagagaggtcattgtgtgaagctatgaaggtgaagcctggattgccttgaagaccccaaaatgttggagataccagagctgtgggataccttcaaaggagagctgctaacagagaatggaatcagtccatgagaaagaggcatattgcagtcaacaaagatgaaaggagttggaggtctgaagaatattttaacttcagacatggagatacagagtttgcccagatagtttttgattcagaatttcttcgatgctcccctttatatttataatgtatatcctatgacattatattgaggcccacagagaagaacaacaaacagaactcatgggatgtggcacaatcatgatgggtgtgcctcagagaggcagagctccaaggactagatgtcttgaggacttgatgctgttatggaaatcgctctatagttctctcaaacatcatgctgctcctaaactatgagttgtatgaaaactctaaggggtctcccagcccctgactgggcagtatctttgacacttagcaataatagtgattgatctttttcaagctttgctgctggtgcagatgaatgattcatttataaacctcagtaagacttagagttatacatgtctagtaacattcaccacccttagaaagaatttggagatatggattgttaggaaagttaggttaagatgtttttgctagtatatttgatatagaaaattttagagaacaatctgaagtccagaaaggaacattcttaatagttgggctaggaaaattttgaggtcaggggataagaacaatggaagcccaacattggctgacatgcctctcttgctaaagctgggctaatgatcaaggtgatgattaatttcatgtactcatttttgccctcagcttcctggtattgattaaataaaaaattgttaatgagtagatgtgcaccctaaggatttaaagtagaagtgactgattttttctataaaaatttagatttgtgattcctttaagatttttataagattactttttaagataaaattattctttctttgcaactgcaaatttctgcctgccagtaaaagaaactggctgagaaaattagcctgcttgcttatactttgttaatatataacaagtgcttgcttacaaatgcatgtgggtttttgaaaatattttttaatacatgatacataaagcatttgatcatgagatgatatagggggacactttttttcttttctttttctatgtatactcactgtaatttttcacttaaagaaaaatggaatgttgtcacattgtaatttttatcctgcttgagagattttggtgagtcacataagctatgggggaaaataaagttaagagaacttgtataataattaagaagattctgtatctgtgtgttctgctgactccatgccccctacttcagactctgatgtgtcaaagctggatatccttatatgttggaagtatgtgatctgctttttgattttgattttacaggaattaaagttaaaagaatggatgagtctcagaagaagctttgaactttggactttcaaacaagtttgagattgttatagactatggggacttctgagattggagtcaatgcattttgcattatgatatggctaaatcctattgggtccaggaagtagaatgtggtagtttgaacaaaatggcccctataggcctattgggagttggactattaggaagcttgcccttgttggagtaaatatggccttgttgaaggaagtgtgtttcatttacttttttgctgcctgaggatcaatatgtagaactctcagctacctctctagcactatgtctgactgcatgctgccaactttcttcccatgacaataatggactagaactctgaactgtaagcctgccacaattaaaagtttttctttataagagttgccatggtcagagtgtctcttcatagcaatagaaaaccaaattaaggcacatccagacacagaaaataattaaaaagaaaataacctctacaggaactgaagactaatattacatcccaaggaatctgtcctatctcctagtctcttctctttctggcttcaccctctagaaaacactctctaaacactgatgaaaatatttgctgacaatgtgaaacctataacttttgtattccaatgccagctacatttctgcttaactgctggggtgcccggtacgctgatcaggggaggcagaacacagtccatcatagggggtctccgtccatgtttccctgggtgagaaacagaggagtctgagatggagatgctgtggttcctagtcacctgtgtacccaggtgctgccagcactgctgggatttgggaacagggctctgcgggtttgagctttccctctccaggcaggaaggaggaaggctgagaccttgatggaagcaaaattccaagtgactgccaatagtaaggacagcttggaaggaaaaagcccttctctaaaagatttaggatatttatgctgaaggccttccctgaggaggtccttcatgaaggagacagtccttgcttgtccaaactgtttttatttgatggcagcggtgaatgcatacaccttacccagggtaaatcaggcattaaataccttttttggaaaggaaagcccaggaaggtatgctcatttggctaaacatttgggagcctatctagaaactgcattagcatggagaactccaggttttaatgttatgtgacccattgtcatggtcctctcagggcaggtgacatggttacgtgttccggatcaggtaattttccagggagtgggctccacacataccattctaaattttaagattccctggggtttgagcctactcaaccttaacagttcttctgtctggtggcatagttcacttgccacacattctagtacatattgcttctgtggtcaacaattccttcaaacaggccatttaatagatgtgctttatcaccttaggacaaaagcatgcaaacaaaccattggaaatagtaaaggaaatgagaagacagtaaaacctgcagtgtctgactagttttggagctttggataggaataatctacctcagtgtttcttagacgggatggttttgtctagagtcattgtggtagttaaaactagaggagggaaatacacctggtacccagtgggtagaggacaaggctgcaggcaaacacactacaattcacatggaagtcatttataatgaaatatttaattgattaaagaacagtggggacatcaagcagaattacataggttgctaaaacttaggaaactccccttgtgatcagatactagggaaatctgggttccctcttggagttcttaatctcattaataaaataaaccaagaatggaatcaaacaggagctcaaggacaattttactaaactttcacagaaactgttccccagactctgtaagttgtagacctcagcagttacccagaagagggaaatagagaagaaaacaattcatgccagttgagttataccatcatggaggtcagccatattgtggcaggcaatcacacggtagagaggatgtctgtagaaaaagagtgaaacacaaagtatttgggaaacctaaagtgttagggaaagtatgcttagaagagaggtagaaagaaggactggagggatggcttactgggtaggagtactggttgctattccagaacactaggcttcaattccaactccacataatgctaacactccacataatgtaactcccaaactgaagagatctgaatctctcttctggtccctgtatgtactgaacataggcagtgcacagacaaacatgtattcaggcaaaaaacatccatacacataaaagcaagtaaataaaaatgtagaaacaaacaaacaataacaacaacaaaaccaaagaaagaaaagaaaaagaaagaaaatgaagtcattcttttctgtgtgcttcaaaaaagttggtgacttacaaatcaacaatagctatactctgtaaaagattataatggagcatggggcggcgggggggggggtgtagaaatttcgggaaggcaaaaaaaagcaaagtatctcatttaagtgataatttttctaactatctctttagcacggctttatgtgagcctacctttctagaggcggtcttttggccaggtgattgatcttgtccaactggaatattagtcatctatacaggccaggtattttaattttttgaccagaaggattatcccttaatacgttgttatcctagcacaaggatcgaaatgaaataaattgtcattaaagtaatgggaaggctaggctgactccatgataagcttcagattggcagttcaggggacgaggcctaaatctctgtttccaagaactgggcaaatccaggcaagtctaggcctcagaagctgccctgccacctggcctgaagcaaggacaatgggtcagcagcagtttccagacttcctcagcaagtttccagacttctccagcaacagcttctagcccctccaggtcccagcaatggagtatcattagagatagccaagattaagatagaggtcacctaaccctccctggaattcccctaatgtgctttaaaacaggcctgggagctcactttgggatcgctctatctttgtagatggtagaccccagcatgctgaacttctgcaaaataaaacactctttgcgtttacatattatttgagactgcagtatcattcttcagagaatcagggaccctgtcttagtcagggtttctattcctgcacaaacatcatgaccaataagtaagttcaggatgaaagggtttattcagcttacactttccacattgctgttaatcactaaaggttgtcaggactggaactcaagcaggtcaggaagcaggagctgatgcagaggccatggagggatgttacttactggcttgcttcccctggcttgctcagcctgctctcttatagaacccaagactatgagtccagagatggtcccaccctcaaggggccttcccccttgatcactaattgagaaaatgcctcacagctggatctcatggaggcacttccccaactgaagctcctttctctgtgataactccagcctgtgtcaagttgacacacaaaaccagtcagtacagtcccttacagtaagaccagttgtcactaattcttcgtttttcactagccacactcagcgttagagcaatggaggcaaaataatagagaattgaaatttttgttgttctgtccaataagtactgtaagtgaaggtgtatataaaatggtgactgtaaggatggagcacaaacttaatctagcaagagaccagttgtggcaggtctatgggtttgcagacactgtgaaatggagattttgagaatcaggacactgggagtgaaccagaagggtaggacttgtggttaagagggatagttaagctcatggagaggacacagttataatgacagttctaggatattctcatgagccttggtggcatagtagagtggaggacaagatcataggcaaagataatttaaggaacggtgaagccaagcatgtggaaaaaagtttctgtaatctttgaagccaatgaggagtgagagaagaggagcattgttggaagtaaatatcagccaggagctaaacccatcaaggactcagggaagaaagtggatgctaaaatgtaacctccaaacaatgtggggatagcagtgtattctgatagcatatggtgcaagaaagtatacttacctgcaatataacttcttccatactttttcgagaataacttaaattctaaatccaaagtgctagcaggactggttccatatgaaagcttcggggaagaatctgcttatttgttccacattttagaggctgctatcatttgctctctggaggcagcaactttgatctctgccctcattgttcttcctctctgatttaggactatgttcctgtaaggttccttagggttattaagcccactttggcagacaggattacctccccacttaaatgttcttgatttaatttaattagccatttcttttcctgccgtataaagtacctatcacaggttctgaaaacagaatgtggacatgtttgttcgcatgtcctatttctctcttggaatatttgagttcttaattctattccccaaacttggctctttatatttgttatttctagaagcactaccaccaatctctgagtagggctctctctctctctctctctctctctctctcattagtattaagaaaggaattaaaattcagtgcaaatcctgtttattccatttctgaaaacttattaattgttcatctgccatcaaatctcacttggatgatggcaaggcctggcttcgctccctgattcattactgcactatcctggtctaggctgaatagcactgacatggttgtgaacaaaaacttccggaaagaaactgcgtctgactgtgaaaggaaattcctgaaagttaactgtttctgcaaagactattggctgattagaatttcagtactctggagagattgcaattttgctggtccagagaccaataattaccttatcttgggctaagtcagaactaacatcatgatacaatagatacaaaacaaacaaacaaacaaacaaacaaaaccacaaacaaccttttagaatctactgacttatcaggcaactagcttctaccaatacaaaagccgagtgccattagagtcatcctgagcctatagaaaagcttccactacctgcttcttgtatgtacccaacaatatattttaaacttgccttaatttgtgactttctctgctctgtaaaaccacaaaaactttatgaaactgcttccatgaaatttggggtgaccatatcattgttccagggtcatgatcactcaaaatggcttcagaataaactcctaatccttttaagatgagagctatggtttttacctttcattttttgtttccagcggcacgttacatccgaattcatcataaggaaataggttcttactgtatactagacagggtatgcaactgtcagctcactgttgcagattagggttaggctccacccttgcagatttttaaaaggagtaaggccgggctatatgcaaaccgagttcccataatgccttgttttctttggagtcgaaggttcctgcaagtggaaaacttcctggagctgacctactaggtattgaaccagtttctgcattgctgaatcaatctcccaagggtaattccacagaaatcccaggggcttggagtaaacaagaccgcgcctagcccagctagaggaagttttattccggaacccagcgccatttctgggtgggactgctttctacaccatttgccgtaaaacgttgtttgagaacggtgtgaggggaatggaggtctcttctcggagttcagagcctctggatccggtgtggctccttgtagccttcggccggggaggagtcaagctagaagttttgctgctgttcttgctgccatttactttgggtgagctgcggggaggcctggggaagcacggacacacggttcaccgggaacccgcggtaaataggctctgcgcagactccaacgctggtctgggctgcctgtgagtgctcagcgcccctttcccatgggtgagcgtggggcgccctctacccagatcttgggtcgtacgcagccggcaggaacgcgtggtctcccagctgcttgtctttattagctgtacgctgtgcttttctgtgctgaatgtagtgagagaaacggtgtggggagcagggggttgcaggaatattgagagatgcaatttctaatcctagaatttggttatgaggaaagttaatatttttgtgtttccttatctgtgaaatggagatattgatgtctttcgtggtattggtatttaataggtgccatcaaatatctaacccaatttcagctccttaatttatttctatcttgagacattccctatgcactttctccgaaggcctagacaaacaggcccagggatacagttttcacacagtgagactgtgtactttatctcccaccccaaatcctcattaactcccttgagcttccactttaaggaaggtccttccactcccactccaaggtaagatttgaaaagctagcaagcctcaaggtgcaatgaaatatttgcaagtagaaaagactgtagaatttacatattaaattttactgatggttaagaacaaaatagagtgcccattttacccaccatgaaagttctaatttccctttcctttctccttaatcagaactttctaagagaaagacttccttgaagtcttttgcattgtttgttttttattgtatttccaaagttaaatgaaaatgatttttttccaacatatagttattggttacatattatttgactctctctgccacataattaatgctgctaagacttaaaagaaaataactgagtctagaagttaaatcaaaatatgtattggaaagtacattaacaaaatgaaatgcagtttcattttttaaattatattattttttccccgttgaccatagtactgatccattcctgagtgccagagaggaggatcatgcatggtccattgtagctagctggagaactgagagtatgagggatgatgcaagttcttttatccaatgtaatgttgctgtgtctcattcaacaggtcactgcccagccccatcacagcttccttctgccaaacctataaatctaactgatgaatccatgtttcccattggaacatatttgttgtatgaatgtctcccaggatatatcaagaggcagttctctatcacctgcaaacaagactcaacctggacgagtgctgaagataagtgtatacgtgagtaactgcagaagaggctcctttgtgccaaatagtagagtcggcctcagtttgtctggattttagattatgactcattattagtaatcttatctaaggtatatagtacatgtggatcatcattcttgtcagtcaagtctttttaactgtgattctgtcttctcaattgttaataaatttaataagaatgattgtcacagggcatgcttaagagaaaatatcatcagaatatttcacttagggtgtctaactttgcacaagtgtcattaagtaatgattctgaaacaaagtgtatttaataactaagagatgaaaaatgttcagactttaaggccaataaattagaatacttagaagaatgcttcatgttttagggagccactgtgtgaaaataagaaaaaacttggatgagagttcttttggaagctagtgtctgatgaatttccccaaagtggcaaaaactttgaagtattacaaatatatatattctacagtaagttataatcaggttagaaattcataaactacagaaagttcagtttactgtacttggttccaaaattctgtttctttttcataggaaaacaatgtaaaactccttcagatcctgagaatggcttggtacatgtacacacaggcattcagtttggatcccgtattaattatacttgtaatcaagggtgagttggcaacaacatctcttcattcaagagttctggaatagcagtactactttctagtcaaatctcaggaaagacatctaatctattacttccttatttggtttttgtttgtgttgtgttttgttgtgtttgtgctacagattgaacttaagactttaaatatgctagacatatttaaacaatataattgttctacagcaaagcaatgccatcgcaatgttacctatccttaaaaggcttgaacataattgtttgattcttgattaaaatgaatagagatataacatgactttgtgggaaagatttgttatccctgttgaataagcaaaataacacatgcgttagctttccaatactatgataaaataattgaggtaatgaattaaaagaaggaaagttatattttcactcataattacagaagttttagttcatgttctcttgactctctggctttggtccattacagcaggaacatggtgaagaaggcccattcaccttatagttgccataaagaaaagagaggcaagaaagggctaaggtctcaatatcttctcctaaggcattgtcactggtgtcctaattttgtcccttaaggcctacctcttaaagattctaccacatcccaataagatcatagcctgtgagactacgcctttaatctataagcctttaggggatgtctctaactatggaaacatagaaagtgaagcactcactggttgagatagtgcagtctaagtacacagacttctgaaattcagagtggatgctgctagaagaaagaaaagcccagggagctccgaggaagatcaggccttaaatttacagcttttattagtttaccaaggttgttgacatgagtaccacagagtgttttcaaacaagaaaaattattaagagtttgattctaagtctaaaagttcaaaataaggtgttatcaggactctgttccctttgatgtctttaggggtgggatctttcttgcctcctccagcttctgggagctttaggccttctatgtctgtagagcacaactctaatttctgtgtccatctacatgattactttctttctgttctgtatgtatttatattcagtgttctctcttttcatagtgatactagttatgttgggttaggatccattctaaagaccctaaatttagcttaactacatctataaagaccctatttccaaatgatgtcacattgacagggaacaggagtttacaggatgaccatatcatttagggaatacaattcaacctcagaaatccctctttgaacatatcaagcataaagtcacaaagtatgtgctaatgttagttctcattactcaacacagagtgaaattctgaatgttaaactataggacatgaactaaatctgtgttcttatcaagatccaaataaaaatggtatttgaaagttcaaaaactttaaaacatttgcttttcaaagaacacttttgaaataacacaaatagaaaaactatctctaaagcatagaatttaaaaagatgtttccctaatatagaattcttataattccagtgaaaagacagataattttaaaataggcaaggctgagatggctcagctgttaagggtatatattgcccttgcagaggacctggggtcagttcttagcacccacatctgcctgtaactactcagctccagggaactgaaacactctcaggccttcactggtactacatgtaaatacacaaaccctcatatacacataattaaaaagaagaaatacatctttgagccaagggtggtggtgtatgtctttaaccacagcactcaggaaacagagggagacatagctctgtaaattcaaagccagtctggtctacatattgagttccaaaccagtcagcttatagtgagatcctgtctcaaaacaaaagaaaaaatgagggaaggattaaacatttttccaaaaaaaatgcataaatggtgtataagtaagacatttactgcatatattcatcaaaatacaaattataaccactttgagatactgccttacctacaaaaatatctctaaaaggaagacaataggaagtgttggcataattggaaagaaatggaagatcctatacatttctgaagtaggcaacataccaatatgtttgaaaactcccaacagtaaacaaactcgtagatctcattagagcacagtgacttgtgaaatgcttgtgaagattggatagcctgcctaccttttaaggtacaacaaaccaatgcataagcaaaaggatgatcgctcatccggaaaacatagctccacaaaatgaatttactatggcagctgtaactgacaaaggagctcaaaagatacttaaccaaaaattcaggatgacttctttgaaggaggttgtgaattgcaggagaacacagaaaatgcagggatacagtaaataaaacaaatgaaaactaaaacaaattccacagtcaaggaatacgatgagtaaactgagaatgcacacaaaggtttgaacaaagagaagaaaaatttaatgaactaaaaaaggggaagcattttgagccatcattaagcatattggtatagcttggtactctctgaaagaacaaagaaaaataaatagtcaaaaagcttacttttttaaaaaaaatgtgacagcaaacttctcaaacataaagagaaaatgaacatctagattcatgaagctataagaactctaaacagattaaatataaagagatcatttaaactgcattttgaaaggagcaagagaaaagcaatctattacaacagagggatattagttatttttctcattgctctaaccaaatacctgacaagaagcattttaagggaagagagattaacttgagctcctggtttaagggcttaatctatcacagtaggaaggcatggtagtaggaccatgaggcaactggttatatcacattggctgttaggatgcagagaaatcaagccagaagtatgaatcgggctagaaacctcaaggcctctcaagtgaccagcttcctccagcaagacctgatctctcacaagttccacgtcttcccaaaatgtaccaccaccctagaaccaaggttcaaatatgagcctgcagagggcatttcacatcttatcgataacaggaggcaatttctgtaagaacatctgtggatttctcagcaaacaacttagaacaagtagagacagctatgataaattcaaattgctaaaagaaaaaaaaaaaaacatttaacaaagaatacagtaccacaacagtcagcaaggctgtcctttagaattgagggtagttggagttcataactattagttgtctttacaagaaatattaaagtgaattcttcaagttttaaaatatgctagctttaaaataaccatagctattgtcatcacagaaacagctctcagagcaatggaaataagatagagtttattttggagccaagtatgagagtgattatggctcaggaacagattcgggttgcttaacataccatgttccaacatggtaacagtttcatgaagtttttataacagaacaacaacaacaacaaaatcttgagacatttaaaggctcattggtataaacaccagatagatgaattatagtaaaacgacctctataataggactcagatgttaaaacatccttagcctttggattggtggaagttaagaatctgtacagtctaaaaggaattttacctgctgatcagaaggacattagtcaaatggatgtgcccagagtaggggtgtgtgtgggaatctctaggaagtctcagagacatgggatggaggaggctcccaggagtcaatgcaggtgaccttcacctagatgcagtggggtcatggaacttggagaggcaggacccccagtgtaggactaaggacaccaacacacccacaaaactttcaacacaaaatttgtcctgtctaaaagaagtgcggggacaaagatgaagcagagactgaaggaatggccaaataactggcccaagtaaagacccatcccattaacaaacaccagtccctgacactattaatgatactcagttatgcttgcagacaggagcctggcctaactgtcctctgaaaataaagtcttttaaagagcaattataattagtaatattaattttcaggctatatattataccctcctcccaccatgtgttaggagtactgttgctgtgatgaaacaccatgaccaaagcaacttggaaaggaatgggtcttgtagatcttgacctggtgagaaatacacatgcctatacatataaaattctgtaaaagctttttttcccccccctgctacgtgatggtgatgctagtttttaatcctagcacttgggaggcagagacaggatctctgagtttgaagtcatgctggactatagaacaagtcccaggacagccagggctacacagagaaaccctgtctcaaaaaacaagagtctctttctcatagcaaaaggagcaggtggaatttaaatttaaaacacaccatttacagttgtatgtacaaaatgatgtgtatgtgtgaagctaataaaataggtatgagttcagttgctgggaaatgtatcatgaattgttttaattttatgatatactagataatttgcagcacattaactgagtattgtcaacattaattcagtattgctgttttaagtatcaagtctttgttcaactcctgttcagacttgagtttctttgctgaatcttgctgataaagcattcccttgtctaggtattcacattaatgcttacagagtataaatgaattcatcttagtataatatacagaaatacacataatatttcctttaccttcaagatgcttataatatctttaattataagacataggaggaaataactataatttactcagattgtgtagtaagataataaaaagagaactctcatttagttaggaaggaatgaagaaggaaatcaaaaagtccagaagaggatatttttgttgacaagaaaaaaaatatcctgaagcttctaagatggtaattcctgggaatcagcaatttaagcagacaattatttacagattacttaatatttttttcttcactcccattgttgggagtcccacaagaacaccaagctacacaaccttaagatatatccagaggacctagctcagagccatctaagatttatgtttgtggattcagtttctgtaaacttctctgagtcttgcttagttgattctgtgggttgtgttcccatggtgttcttttatttattttttatttttttattaggtatttatttcatttacatttccaatgctaccccaaaagttaatattctttattctgtgtgtagataccgcctcattggttcctcctctgctgtatgtgtcatcactgatcaaagtgttgattgggatactgaggcacctatttgtgagtgtaagttgaaatttttctgttacttttattcatgtattttaaattttcgcttgaattatataatttttgcaggactgagattgaacccagggtctcatgtatgctagaggttttctactaaagacatcaacctgcaaatttacagatatagacatgtaaattttggccttgtgcccaacaatttgcacaattttttaaactttctgtataaacttgctatctatcaacttgaccaagttttgaaatgtttacttccttgggtctttagtgtatatatttgttacagcttctgggacatgttgactataagagataatattagacctttagaggttatcttaaagcatttacttactgcaggtttttaaataagacattatttgagctgagtacattccttttggacagtgaatacaaattttgtacttttctatgagaggtgcgtggccacagaaggagctgctgctgatctggtgaggagtgaaagggttttgtagtccgaatcagtgcaggaaggacaaaggtggtgtgactggagcattcttgttatagaccaaggagaactggaaagaaaggtgcaagtctgtttggggatacattaggagggccactctgagtgttctcaacttggttattgtataaaaaaggagaaaaagatatttgtggactgacagataaaactgtgtctctgtgcttatgatcaaagagctagaagaatctgtaaactttcagtctctaaagcagatgatgatatctgatacactgtccgaaagttcctaaacaacgaaggtgagaggcctaaggccaaagcaaatgacaaagaaaaatgtcagaaacaaattgccaaaagacataggctatccttgttttctacttccaagtctgagtcaaaaataactctttaacagataaatgatcagataaaaattatattctttgattaagaaaattctaatttgctgaaagaattgctcttattatgcattttaattctaattctacacatgaaataatcatatctttttttcttttatatgtcacattgacttttaaaggccaaccaactaaatttgtaaaataagcctatcttgcttctgatgtgttatatattattatcttctatatttgtatgcagatatatgtgtgattgctaatattttttaatcttagcattataaagttgttttactatttgaaaatcaatttgtgaaaccccattttgatcattgtattaccctgtttaaatattgctgaattcaattttctaattttgcttagtatatttgtatctctgttccaagaaatactaggttataattagattttttttcttttagtatcattgtttagtttaggcatcaagattatgttggcctcatatgttcttgacattattatttcctgttccctagaataatttgtttaataataatactatatttgcttacatgtttcagtgggttcagtaacggagtagtctagatctgagtgagggggagttgttatggttattacatttttaattgctgattttattttcataataactaaaaaaaacattttacttaatgtcttattgaactaacttgggataaattttgtttttcaaggcatttactcatttctttttatgttttcttagttatcagcactatatttatcattgtgtctactcattatcattttgatgtctatagattttatagtgatacaaagttgagatattggttataacttggtcagttttgctgaagatagatcaattctgttaagctcttcaaagacaatctttaactttgttgagttttatgtagtgtgtgtctttttaattttcattcctaccatattattttctttctttcattttcttttgactcagcgttatgtacttctccactcctaaattaatgacatggctgataagataatttgttttaaacttttattttttgtaatacacttttaaacctataaatttggttcagactgttttatttactttccaaacagttatttgtctactactactgtgcacaaaagttttctaacagactaattataagtgtgatacttaatttctaaatattgggggattttccagttcattattttttcctagtttactttgaaacatattgagtcatattttatggctcagaatagggacaattttgataaagtattataatgttgttaaaaagaatggatagtggttttatgtaattttctataaatgtgatttaggaaaatgatttagaatacatttttgttttcctctatttttctcttactgataggagtacattctctaaggttcatgtaacaagttattgccggcttggtagcttaaagaagaggaatttattatcttttagtttgatgggcagaatgctcaagtcaagatatcagtaatatgcttggtgtcttctggaagccaagagagagaatctgtttttttcttctgcttttatggtttataacaactctgtctcctcgtcacattatcttctgtattgttgttgtcttttcatgttagagaataatatattagtttctataatcaaacccacaacagctaaaaccttacatatttaattcagtgtactacccttgaacaaataggaaagcattaagttttttatttctaaactgatatagctattgaaaggtgtagcctaggctagcttcagactaattggtcatctttactccacctctccaacgtatcttactgtcatgtgtcatcacagctagcactgctaaattctgtctgttataaagacaataactgcccttgtttaccacaatctaatacaaactgtacttttccaatgttcccaatacaaacaacaccaactgtgtggctctatagcttcctgctattatcttttttatgttactttttcatgcttcacaagagatgttatttttatagaaaaaattgtttgtatttatcctgcaatgaattatgctgccttggcatccattttgaatatagtagtcctacttggctacacttttacttttctgtggtttaagttaaccatgatcaaccagtccaaaaaaaaaaatcttagatacaaaattttagaagtaaataattcttaagctctaagttatgcatcactataaaaagtgcgatcaacttttatgctgtcattttctattcaacgctttcccactgagggcaaaaaagatctttttcagtatgtctgtttatactgcagatgtgaaattgttccttagccattcaatagccttcccatttatcagactactctaggtatctaggtatctagtgcttgtgttcaaataatttttatagcagcctagtgctagaacctttgccattcacttcatttcatctacagacattcagtagtagattaaaaaagccatataaacttgaacaacattcaaataattcttcatctagacacatcacaaagatataaaatctaattctatcatcctttatagcagccatgaaacaaagacagtaactgaaaggaaccaaaggagaaaatgtttcaacaatgaaagttccagatctattaaatacaaaagaatgctttttgaatctacaattctgtgatatcttttgtcagacttagaaagttcttagttattcttcagtattatgcatacttttatccctccattccctctgtgtatatgtcattccacctgagtatatgtcattcctctataccatcattccttgctaccaccactgcttgtttaaaaacaaaaacaaagaaccaaacaaaccaggagacagattactggagatcattttattcaaacttgggtttagaaaaaacggggtagaagttatgctcctgttagcacaatacatataactctcaccttaaagcagaaaagaaaatttattttggaaccagacatgaatgaccatgactgggaaacccagatttaggttgccccacattccatgatctaatatggcaacatttgatgaagttgtagtgcaaaagctacagatcttattttaaaggaacaagagatagtttattcaggagctatttttaactgactatggcccagtaaaagagatttagattttgccaaattccatgtttcaatgtggaagcagtttcatgaagttttgtatttttctagaacaaggaagtattaaatcaaggcaaacttaaagtaaattattggatatattagacaggcagttaaaatgagatggaaaaagcttttctgttgacctaaagtgatatctgataacagtcttagcttttgggttggcagaagctaatggagtgctaagttaatagattccaaaatgcttctatctactagtcacaagatgttagtagggaaggaatggttggttgttcttgggggctagaactagcccatggtaggtatttagcctctggacctacaacgtcccaatttcttcagactagaactctaatcaatcagtctctgcatatatgcagcttcttttcaggaaatttctctcacaaattttccatattaaaaaaataaggaaagccataataaaggcacttttaaaatacattggtagaaatattaagtaggtgggcttgaagcaaagcagagaaacttctatagacctcagatgctatctggtggtattcttagccttttattagtagaatccagggctgtgttaaattaatatatcccaaaaatgttttatctgttagtcactaggccactcttcttaaaagctctgttaccatcttgtcacccagtagaccaagcctttggtacattgttgttatgggaatattacctatatttctatatttaaaacacagcaataacccacactctgcagataatagttttcttttttctgtgaggctccaggacactggccagatgacactattttgattcaatgtcagaaactttaatttttcttggccatctacagtacttgaaggtttccaacctttgagatagtaggtgtcagtcatcgttgattctaagattacagttctttacaaggtatcagcagaacttccttatttaggaggccctggactccagtttttattctttgatttgataagaccaccacaaactcaatatattcttcattacctactactggttcgactccctcttccccaaggaactggaagtagcccagtacgaatcactttgactttaagaatagttagggttttttgtaaactagttcgtaaaaatcatcatatggtaagcttgaggtttcagtcctttacatgtctcaaagtacttgaaattatatatagaattatgtgttacttgaaaattgacagaatttgtggggttttcttgtattcttaagagttatttgtcaagtttagctttacatattttgcatgaatattaatggtctatattttcacttattcattacattttcaaaatgcttaatacagagtaatctacagtttcaccaattttctcatatttgcaggcatattcaaattatattttgtacttttatccatttttttcatttgcctcttattttttcttagtgaatattattttttaaaaacttcctttcagttaacaaaaattttgaaattttaggcaagaaaactaatataaactctctaatatgaccaaagagttatttcaaatgaaaaggtcaactgcataaataggaaagtcagagcacatgttattgtatgcatctaaatggcaacatttaaaaattcacctacaagtcagtaaatattaaaagcaaataaggagtgcagatatttttagttcagtgattcattaggtttaatctcttttctttgcccagggattccttgtgagatacccccaggcattcccaatggagatttcttcagttcaaccagagaagactttcattatggaatggtggttacctaccgctgcaacactgatgcgagagggaaggcgctctttaacctggtgggtgagccctccttatactgtaccagcaacgatggtgaaattggagtctggagcggccctcctcctcagtgcattgaactcaacaaatgtactcctcctccctatgttgaaaatgcagtcatgctgtctgagaacagaagcttgttttccttaagggatattgtggagtttagatgtcaccctggctttatcatgaaaggagccagcagtgtgcattgtcagtccctaaacaaatgggagccagagttaccaagctgcttcaagggtaagtctgacctgagcttcgaagtctgcaattccatgggggtattggaggactagggacagggttggttctggatgagggaatacagtgaacaggttgaatgaataaattttcttggaagggaatatgaaatcaaggagggatatatgtttgtgtgggtgggtgttcaaacaatcttataagcacatccatttgaattgagaagcagagctaaatgtgagcaaagaatgtgatacatcctgggaattatcacacactgaagttcttttcatgcattgtgatctccagcttccatcaattattcatatgcataatatttactaatatgaaatgagtgatccatgggcagttatatttaatgtatgcatatttaatttataaaacaaagctatggagtacttactattttttccatattgaggcttagaggttagataattttccaagatgatataagttgcagagcaaagattagaatctaagtctgcctgtctgccagatttttcaaagaacaaaggctttcctataggaaatgagttataaagatgttagaaggtcagaaagaataagaggaggaaagtaatgttgctaaagattagggagctactgttactatagaaatagagctgatatagctggctctgccctgtttgacactgtcactgtcagccagactctggtatacttccagaatagagccagtccttcctggtcatagctgttgctagaatctgagtgctactgctcacttgagagtcatcaagactgtctcaactgaagctgttcctggagacataaaggtgtctatcatatctcttgtcctttagtttgatatatatgtttccaggtagcagaacttaattagaggcctagagctttatttcttaacctgtgggttgaaaccactttgtcaaacctctatctctaacaatatttacattacagttcaataacagtagcaaaattacagtttcaaagtagcaaccaagataactttatgcctgggggtcatcacaatatgaggatttgtattagggtgtcacagccattaggaaggttgggaaccacttccttagagcaaagaaattgtagttttcatgcctctgcccataatagtcaaaaggctgcccaaatagtcatatagcacgaggctgggaatcaacataaatttaatcagcctagtctaaatatcacagcacaatgtattagtcaaagatgagccctcaaaggaaatttattgtagaccagtaccacatttttaactggagaagtctaaaggacagaaagaattgacttgaaatgaggctttggattgttattgtttttgttgttgttgtatttgtttgtttgggtgtatgtgtgtgtgtatctgtgtgtgtgtgtgtgtgtgtgtgtgtgcctatatgtgtgagagagagagacagacagagagggagttttcctcattttgcaacttaatgtaattgttttaagactcacatatatcctcactccttgagtgtcttatatctttagcaaaatggtaaatgctgagaccttctggatagcccttaaagctgtgggaaagaactctgaaaatatgagttcgaaaacatataatttctcaactatggattagtttctcaactatggattctcaaacataaggatgcaatatgaattgtataaggagcttcacagatctaaaggagcagaggtagctgcgctagaagccaacttgtcagaaaaatactaaggaagaagataaagagattaggggtagtgatcacagaagatctcacccagctaagttttttgttcatgctttcaaaagcaggcagattctgggtcagcctgggacagagcaaagttaggcccaggcatggtagaaatggtaatttcaaggcagattcccacccagccagtctatcctctgtgccattatcatagtagcaaaattactgaaatgttgctaaaaagatatttcttagttcatttccatggactcagagattttgttttgaagagggtcagaggctacttttaacaggtcaatcaaaatcctctgatatagaaaaaccatacttcttagaaataccactttacaaatcaggagacaattacaacagaaaaggaggctttgcttgaagttgaggaagatatttatggctgaaagaaaaataaagcaatttaaaggatgaattaaataaaataagagaaattagatagtatgtaaaattagaatcacaagttactaatttctttgttctatatacgaaagtaggctagaagcatttacctttactccacagcaaaaaaataccggtatatgttatataacaagagagttagcatgaaattgtaatttttttaaattaggtgtggcccacatggaccaagggctaaaacatggttgtcctgacatagctttctaaaaatttccagctatatagttgataatcaaagtgtcccatgttccttcactgtatacaaataaaagtcagaaaatttaagaataagattgtgagggtgacagttattctttattgaaaatatatcccattttgtagagggcgaaatctgcggttacagatgtctctataatagcaatttcaattaaccataacatactaatttccttgtgatttttctaattgcaggagtgatatgtcgtctccctcaggagatgagtggattccagaaggggttgggaatgaaaaaagaatattattatggagagaatgtaaccttggaatgtgaggatgggtatactctagaaggcagttctcaaagccagtgccagtctgatggcagctggaatcctcttctggccaaatgtgtatctcgtaagtacaaatgtagaggtggagcccttcctcactgactgcctagtcatctatctatcctggtgcctaaggtgatggggtgtgatgatatgtagtgatgagggagctgagaatgtgctgtctcaaattttgacaaattggaatattagtaaaaatcacttgaagtgtgactgcaggagtcttttggaagattttctgaagggatattctttgcatacaaagacaggaaaataaccttaatcaccacagaccaagaaatggggctgtgataaaacaagtaaattaattcattgtagtaaacattttctttaccaatttttactttcttacccatacatctcttaatgataatcctagaatttatccaggttcagtgacccatttgtcttgtcattccttcaaaaatttattatctttgtctgcaaagtataaaagcatgttgcttaggtcacttaccttatgaagggctaagtttatgaatagctttaataaaagttgaatgtttgtgttctttatcaatccaaccaagctcgctactaaaaatttaaaaggaaatagtaggatttcttttcctcaacactaggtgtttggcaataaaacacaagacccccaaaggctcaacatgaaagcagccccttcctttctgtcttcatgcttcccagtctgtcatctctcctcaagctcccactatctcattctaccattgcatttatcatatgggtttctttatggcttgagagccaagaaagcacatcaatgggtggagtaggcctagggagtgccttccacacagtagacagctgcaggccatgtctctcactattgtagctgaagttttttgttattctgagtcctgtaggacagtcaccctctgctggttactggagggtgttgtagcttgtacctatcaagggataactgagcagaattaaccccgactaacgtcttggagtggggtgtcaatccatagtagattacttgcttatcacgctcaaggcagtgggttccatccctagcaccacaaaatatcgtagcaagaacaacacctaagtgctaggtatttccctttctgcctgtttaagctcttatttataatactggttatgtactaagatttttcaagatctatttttacatctaatttcttcaatgtattcattataattatcaataatttagagaaattataaacttgacattccatagtatgaaattttatgcatttctttggcaaaagttaatgggtacactgaataagaacatttggagtatactaaagatctggctgagacagaaagaaagtttagacttctgggaaaacagcaccacagatactaagtcaaaacaaaacatgaggtaacaaagcaaacataaataagttaaaaattgatattagtgaaataagagtttttatagataagaaagtatcttataaatataatgaagacttcataaaagttatcaagtaattaacttaatatttcaaggcaggttaggacattttttatcttaaatacatacaagatatgatatagagttaaagttacataaattttaaaatagtacatttatcaagcaacttgagctgaggaggatgtggttgagtgagaaaccgtgtgtttattagcaggcaaaagaccctgttttggttttggtggctttgtttttgtttttgttttcatacaatatattctaatccagatttcctatccctcttctagatctactccaccttcctacccatccaactctacgctgttctttttctttaaaaacaaacaagcaaaaagcacggaatagaacaaacaaagaaacaaagaacaagcacgagatgcacatacacacagagatacaagcccacacagaaaacccataaaactccaaaatcagaaaccataagatagaaaagcaaaagaagaaaaaggttaaaaaattgcccagattaaacaatatgagacaaaatgaaacaaaaacttctctaataccaccaagtttattttgagttagccatatattgctgggcataaggcctgtcgttgagtgtattttgtatactcaatgaaattccactgaagaaaactaaatttttacttgtgagctgttgtcaacttgagatggctacttggttcgtgacgggagagcatgtccatttccctatctcagtgctgggaccccatctgacttagacctatgcagaccctgtgcatgctaccacactatgcaccagtaacatttctttggctttttctctctttcaggctcaatcagtggtctaattgttggtaagttctgtgatgggtttattgagaaattctttagtagtatctacttataaaaaatgatatgtaaaaagaagtaaaaaatattttttaagttcaattaaaattaatgtaaatttaggatagcagttttcaacctgtaggccatgacccttgggggctgatggaccctttcacaagggtcacttaaggaaaatagatatttacatatgattcattacagtagcagaattacaattatgaagtagctatgacaataattttatagttggggtcaccacaacatgaggaactatattaaagggccacagcattaggaagtttgagaaccacgggtttagggtgtcatgagattggcatcttcatgcactttgaaggacctcatctttgaattatttgagtgagtaatcaatcatacttcgctgtcaacaattatttattttaatatgactggagagtcaaatctttctttactttttacccagaaatatccatcctgatagtttgtattgttaaagtcataagaccgtcatgtgagtgaatcttgtgtctggagataaaagacttagaggagaaaggaggttttattcttagctaataattccagggtagaggccatcactgtggggagtcaaggtggcaggaatttgaagcagctcctcacatccactgttaagaacttttttccattcttgtacagtccaaggtcccttgcctgagaatgatgccacctacagtgtgtttctatagggccaccttaataaatgtaattaagatctctccctcagacatggccatagtccaaccagagctagctaattcctcactcagattttcttgtcaagtgattctaaactgtgttaagtcgatcatttagccaacacaaatggatttatacagtttgataccaaggggatttctgtcacagagagcatcctgtctcatgcattccactaaagccttgggtaaactgtgtgtactgagcccagcagcaccattgttatgaagggcgatgttgttgggaagaagcttatggaatgttctggtggccccataactaataatgtaggtctaatgtcctagattaaaaccaaaatagagcagaacctaggctaaagttacatggaaaagaatcattgataaccaacagtgggattagctattaagatagagtttaaaaattttgtgatgtgttttcatttattttgttttcctgtttaggaattttcattgggataatcgtctttattttagtcatcattgttttcatttggatgattctgaagtataaaaaacggtgagtaaagccacattctcaaaaaaaaaattgtagcaggaagctgtgaccaatacctgtatcctaacatcctggtggcttagacaggattgccataagtttgaggcttgcctgagtcacagaataatataccgtgcctcaaacaatcaaagcaaaagtagtttggggaaggtggcttagtgattaaaactcttgtacagcaagtatgaggaccaaagtttgaatccccagcacctatttattgccaggtggacatggtggctttcacataattctagtgctcagaaggtagagacagcggatatactggaacacattgattagacagacttgccatgtaagtgtgctctgggttttagtgaccttgtttcagtggaataaggtggtaaacagtagagaaggacttctaacacatacatcacttatatacactctcacacatgcaaatatgcatacagagagagaggagagagagagagagagagagagagagagagagagagagagagagagagagagagagagagagaataaaagaaaaataaaaaactgaatttgtaaattttatgttccttcttttggaaagcaatagaacatacttccataaagacaggtaattctcagaaaggtggccttggttatacaaaatagtatatttacaccaaaggaaatatatatgatagatattttaagtgtgtgtgtggggtgtgtttgtgtgtgtgtggtgtgtatatgtggtttgttgatgcctagcttcttgagttctttatatattttggatattaccgctctattggatatggcattgatgaatttttttccattctgtcagctggcatattgtcttattgacagtgtcttttggcctcacagaagctttacaattttatgaggtctcatttattgtcagtctttattcctgtgctattagtattatatttactcctgtgccagtaagttcaaggctattcctgtctttcttttctgtcagtttccgtgtgtctggcttaatgttgaggtctttgatccactagacttgaactttgtgcagggtaataagtatggatctatttgcaatcttctacatgcagacatctagttagaccaggatcatttgttgaagttgcttccttttttctattttgtatttcaggcttctttatcaaaaatcaggtctgtaggtgtgtggctttatatctgggtcttcaatttgattccactggtcaacatgtctgtttttatgccaataccatgcaatttttattacggtagctctgtagtacagcttaaaatcagggatactgacacctctgaaagtttttttattcttcaggaatgttttagctatcccaggtgttttgtttgtccatatcaaattgaatattgccctttcaattgtgaagggcaattgtgttgtaattttgtaaagaattgtgttgtaattttgatggggattgcattaaatctgtagattgcttttggtgggatggccatttttacattaattttaccgatccgtgaccatgagagatcttttcatgttctgaaatcttcaatttctttcttcaaagactggatatttttgtcatacaagtctttcacttgcttatcttacattgtggatattgtgaagggtgttgtttctctgatttctttcattttatataagagttctactgaattttttttttttggttaatcttgtatcaagccacattgtatcagctgtagatgttccctggtagaattgtgggggttgcttatgtatagtgtcatatcatctgtaaatagtgatacttagacttcttctccttccaagttgtatccccttgatctcttttagttgtataattgctctagctaggacttaaagtactatattgaagagataggaaaagagtggacagccttgtcttgtccctgatttcagtgaaattgctttaagttcctctccatttaatttgatgttggcttttggtttgtggtatattgcctttattgtgtttgggtatgtgccttgtatccctgatttctccaagacttttaatgtgaggggtgttgaattttgtcaaagacttttccagcatctaatgagataatcatgtgggtttcttttcctttcagtttgtttatatggtagattacattgttggattttcgtatggtgacctatccctgcatctctgggatgaggcctatttgatcacagtggatgatcttttcaatatgtttttatattcagtttacaagtattttgttgagtattattgcatctatgttcataggggaaattggtctgtaattctctttttttggtgaatctttgtgtcttttgggtatcaagggtgactgtggtctcataaaatgaatttagcaaagttctttctattttctgttttgtagaataatttgagaaggattggtgttaacttttctttgaaagtctgatagaattatacattaagaccacctggctctgggcttttgcgggggatagggggaggttcaatgactgctatttctttaggggttacagatccatttaatcttgatcttgatctaatcttagtgaggggtatctattgaaaacattatccatttcttttagattttccagttttgtggaataagagtttcctcttatttctcaccaatttttttcatgcagtacttagtgctctgaactttcctcttatttccactttcattgtatcccataactttgggtatgctgtacattcattttcattgaattcgaggaagtctttagtttctttctttatttcattttgacccatcagtcattcggtagagacttgttcagtttccatgagtttgtgggctttctattgtttctgttgttgacatggtagtctaataggatgcagggggttatttcaattttcgtgtatctgttgacgtccattttcttggaaaatctttttctaaccctttactcagaagtaatgtttatctttgatgctgtatttgtcgtatgtaggaaaagattggatcctgtttcacatccattctgttagtatctttttattgggagaatggagttcattgatattgagagacatcaatgaccaatgattgttaattcaccattcttaaccctaataccaactcacagataatccagcatggaagtatttgttatttatgttatataaagtacttgctaagtaactccagaaatcatggtataacattcctggtgaaagcatggggcttatagtcagacctgagttccttgtcggtcaccagctatgaatccttggacaaaacactggccatcaagcgtcatcttccttgcctattgtataatagcccccatcttactgaacacagtcctatacttataatgaatgccagaaaatgtttttttcattagttactgatcttaaaagtaatcaactattttctttttctgtaagttattacatgtagtcatccctcataacctgaaggctcttggctctagaagtctcactgatagcaaaaacctttggatggtcaagaaaccttacatataaagagggtagtacttttatagaacctcctacatgtcttatttatctgtagattagttgtgataatataatataatataatgaaaattctgtgtaaatattttaaactatatagttatactctgtggtttagggaaatggcaagagaaaagcctttatatattcatcagagttacagctttttttggtggttttgacttgtagcttggtgaatgtgtagatgtggagcctgaaggtagagagggagggaggtttctttataacacctgctgctactgtgctaatagtgaggattactttgatacaaagtagaactagtgatcacagagcacaatgatgctatatcaggttgtaatgtaaagctgttagtatgtgaagttgttaaaatttgtggtaaatctatttactaaccaaaagtacttcagaaatagtgagataagttgttgtgaggcttgggtacatgtatataaacaagctagagtcttgatacaatgggtttagtgttttctagtctgagtttttaacttagtaaaattataacttaatatcaaaataaaagttattaattacttttaaaactgtaagatgattcatacagttttcctttcctcactaccaattagcaataccacagatgaaaagtataaagaagtgggtattcatttaaattataaagaagacagctgtgtccgccttcagtctctgctcacaagtcaggagaacagcaggtacatatgcacatcctgaattgaaaatgtttgcatcaactcagatttaaaaatggacagtagagatggctaagaggttaagagcaccgactgctcttccagaggtcctgagttcagttcctagcaaccatatggctcatagccatctataatgagatctggtgcccttttctggcctgcagatatacatgcaggcaaaatgctgtatacacaataaataaatcttaaataacataacaaaacaaaacaacaaaatcccaccccaaaacagattaaaaaacagaaacaattcaaacagaagactgcacacagaagttggaaagtacttctcgagctggaaactttagtttgcttcctgggttattgccatttttatgatttttgtttgataactgttaatactgtgctaaggtatacatgagcctttgggggacagtaggttttgctttttcctgtgaaagccaagtacctgctctctaagggtacacacacatactgatgagggatctcttaagggtcctcggtgactctctctacctctttcccaatttctgtactcacttggcttcctatgactctgactctgtctctctgtctgcctgtctctgtctctcttgtttctctctttctccatttttcaaagcagggttttgctgtgtagcactggctatcctgcaacttactatggagaccaggctgaccttaggctcagagatccacctgtttctgcttcccaagtgctgggattaatggcatgcttcactgccacctaacttcactctttttctgtctttcttttactgcagctatatccatccctaactcatcaatcacctcttctgtgcatcctcaccacaaacccttatatggcaactattggccaaaggtttggggttgaaagagaactaatcctacactgaatgaattatgattatttaactgaatattgtgaatcactgaattataaaccaagtaacagttccaaagatccaactccaatcttgttgcatgagccattttatttgcacatcttcactcagtcattctctctcgggcagcaagggattagtgaaacaggcccagaagcatcatggcccaccaagtcctagatacttacaaatttgccctgttttttggcagttttgactagcaaataagattactccaattttgatagtttcacataacaatagctttgtactgtaatctgacacagcattattgtactctttgatcacaagtaatgttgacaaattctactttatatcaaagaactatgagtgacaacaaaaactgggtagttcccttaagccctgaatttctatcctttccttgctttattcagtaggtgtcctgaagattgctcagttatattgctttgctcaggcacctcacttcagcccttgggcctctcacaaattcacagctctatatttctgtatcacacagagatgttcatttgctcactggcttcctaggaatcctaacataccctgtccctagcgtcttggggcgtctcagaaataatagcgcagccagtacagatctgtcattttcagttatataaggagtttgaggtcagcctgggttatctgagatcctatgtgaacaaacacacccccaacaatacatttctaaggttatttcacaaacactagaaataatcacagctcatgctctgaaaaggagtgtgcagctctcctaataagtggagggaagagcatcacattgtttaataaacttcttctatgtccctctcctttctgataataatatgcgtcacttgaaacttggcattttctgccaatacacagttcaacaatggacagttgaaaagggcctcagtagaaaaatagtaggtacaggaaaggcattttatagtcaatagagatataaatacaggcaactcaatttttttctaacataaaacctgcagtttgttgtattaaatctttaatctcaattgggagtttctaccccacctttgatcatccagttcccagataaaagacacacaacatttatgtttataataagcctttaaagcactagagctgggcagatatctaccctttaagctattattttctacttccctatccataaccctgagttctaatttgccatattccacttgggcagctcttaactccaactggctatgttttcatgtttcacctattccatgtcatcttttcctctctccatcttctcttccctcttgtgggccccttcaaccccacccccccaaacccgtgtcccctatcccctacctttttttctgcctagctatataggctgtaggcatctttattcaaccaatagttttaaatataggagcaaacttacatatcatcactgtgtatacatgcagattatctcatctctgggggcatccaggccttggggaccacaatacatagcaaaagaccaaacctcaacagtagttaatattttcttttcttctgcaatggaagtaaattagcaaagctttctatttattttctagtttcctagttactttttttcttttctcttgaagattattttttttaaatactatatataaaagaaagtgaaatactaattttttaaaaattcagacaaagtaaaataaaatgcagtgctttgggggattttttaaagatctgtatccaaggttcttaggtatagagtttgtttacaccctttactattgggattgttgatcggaaaattgtgcagaacaagtttcaagctaaccatgtaattatattatagggagagaataacagactggaagctaggtttgtttttacaggaagttattttttaaacatcccataaaagtgcttaaaatatcatatatttagatccataaatgcaagattacccacctgagacactttctcatttttctttttgctgaagtaccactagcccagcacggaattcactcactcaagaagtctcctaaatagcagcaacgtgaaatgagaacatgctctgtctgtatcacttttaaaataaactgtttccttttaagatctaggtgtgtggttcatacttataatttcagcacttgggagcggacatggaaggaatgccacagattcagagtcacccaggacatttaacctatctcaaaaataaaaaaataaattaaaaagtaggaactcattctttaaaacagtaaacatatagactactttatatatatattgagccagatgcaatagctgactcctgtaatcctagcacatactctggagaactctgaggcaagagtattactttgattctgagaagaaaaaatcaaaaggtcagtcttgattacagttttccagaacatcagggttaattatttttggcaacactttgtagaaaagggttgagaatctgtactaagcacaagtcctttgtgcccaggctaaatgtcaaagcaatgaagagacaaggtggaggcatatagtgaaggaaagaatgtttgcaggagctgtagatagtgggtgatgctgatcagttgagagagagagagagagagagagagagaggcagagagagaaagaagagaagagaaagaggaagaggaagaggaagagaagagagaacaatgaacagtcaagtaggcaataacatctaggtcaggtagcctctcagggctgtgtccgctggttgaagcacagtattcaggtagaaaggaaaggctccagccttgtcagagataaactctggtacccggtcctgaatatgccacccttgcttatccttcatggtaggaacaggagaaggatgtgcttttcagagctggctcttctctagagaacctactagtcactgtttacacctctgccacaagtccacatctaaagagtcttagagaaatgctttgtgcattatgggtgaactgctttctatttacaaattaataaaaggaaaaaatataaggtgtatcattaatcttttgtttttattggatattttctttatttatatttcaaatgttatcccctttcctagtttcccctccgaaaatactctatcccctcctccctccccctgctcaccaacccgcccactccggcttcctggccctggcattcccctatactggggcatagaagcttcacaggatcaaggacttctcctcccattgatgatcaactaagccattctctgctacatatgcagctagagccatgagttccaccatgtgttttctttggttggtggtgtaatcccagggagctctggtggtactggttagttcatattgttgttcctcctatggggctgcaaaccccttcagctccttgggtactttctctagctccttcattggggaccctgtactctgtcgaatggatgactgtgagcatccacttctgtatttgttaggcactggcagagcctctcaggagacagctatatcaggttcctgccagctagctcttgttggcatccacaatagtgtttggttttggtggttgtttaatgggatggagccccaggtggggcagtctctggatgatcatcccttcagtctctgctctgaactttgtctctggaaatccttccatgggtattttttctcccttctaagaaggatcgaagtatccacactttggtcttccttcttcatgagtttcatgtattttgcaaattgtatcttggatactctgagcttctgggcaaatatccacttatcagtgagtacatatcatgtatgttcttttgtgattgggttacctgacttaggatgatatcttccagatccatccatttgtctaacaatttcataaattcattgtttttaacagctgcatagtactccattgtgtaaatgtaccacattttctgtatttattcctctgttgaagggcatctgggttctctccagcttttggctattataaataaggctgctatgaacatagtggagtatgagttcttactacctgttggagcatcttctggatatatgcccaggagtggtattgctagatcttctggtagtactatgcccaattttctgaggaactgccaaactgatttccagagtggttttaccagcttgcaatcccaccaacaatggaggagtgttcttctttctccacatcctcgccagcatctgctgtcacctgagtttttgatcttagccattctgactggtgtgaggtggaatctcagggttgttttgatttgcatttccctgatgattaaggatgttgaacattttttttcggtgcttctcaaccattcagtattcctcagttgagaattctttgtttagctctgtaccccatttttaatagggttatttggtttcctggagtctaacttcttgagttctttgtatatattagatattagccctctatcggatttaggattggtaaagatcttttcccagcctgttggttgcattttgtcctagtacacttcttccttttcatcatactttcttctgccctgtataaaaaccacaacaaagggtaataaacactttttatgaatctgcatttatattaataccaccatcctgattatgtaagagtctgaaaattagtgaggaagatcccagactcagatagtatgcaaagacaaagtgtttttttctgcagaatcaaccagcatgaggggggttcagccattcttccaaatggcaaccctagacaaaggcattctggcctaatcctagagttcctggaactctagaaggattaggtaatctctaatgtgattggcaggggccaaagtggtgacattggtataactttgattggctactatattgagagagtgagttaggtaatctaaaatttcattgatgggtgctgggaggccacagggattggcttctgattggcttttgccaggtggtaagtggtctgcattcctgtgtcttgaatgtttagccacaggatgagataaggccggccagcactataggcccatccggagataagatattttctagttcttctggttatctctaggctattgggagggggtttacgaccttcttcctggaatttttgatctgttccggaagctggtgacctatggcctagtccctgggatttatggtctgttcctggagctggtaacctatggcctagtccctgggactggtggctgtctttttaaaattaggcctggtcctaaaatggagacaaatggagtttatgttgtcctttcaattattagcgtatgaattcttcacagtttaggtattcccaatgctgtcgtaagtgaaaatatcctgttattttaaatgtcccttcttgacaaaacaaacaaatagcaaacaaacaaacaaaaaaactgcaatattatggataaagttagtgtagaagccaattcatttcaacagaatgagatctgagattcaagtctttgatattacttcaaagaaatgcaaaagactttggggatgaaacttctgtcacttccatgtacccataccctatgttgaaatcacatattatctagttagacagagtgaacagaaaactggatgacttgaagaaaggagatatagtctaggagttatgctttataagtctattgttttcctttttattttaaagtgttcataatatggaataagatcattaaagaacattaggaggatgtaaaaacatacaaacaagtaaattcttctatgtagcctagtcactacttactaggctgtttcatatatgtctctacacatgcatatttttctcaaattgttcctacatttctaaaacagagcacactttcaaaacagattgaagaaaaacatgtaataacatttatcaccttttctagggaatagaggtaacttttgtttacttagaaataaatttttaaaaaatgtaaatggtgataggaagagttactaagagtattcaagaaaactatctgaaaaaaaacaaaacactaaactaaactctgggtttcttctactttaaaagttctttgtaccatgctcaatattttaaaaaatgaaataaaagaactgtcaaaaaaaaccttacctttgaataaattcagaatacttttttttcttttccaatttttattaggtatttagctcatttacatttccaatgctataccaaaagtcccccatagccacccacccccactcccctatccacccactcccccttttnnnnnnnnnnnnnnnnnnnnccactccccctttttggccctggcgttcccctgtactggggcatataaagtttgcatgtccaatgggcctctctttccagtgatggccaactaggccatcttttgatacatatgcagctagagtcaagagctccagggtactggttagttcatattgttgttccacctatagggttgcagatccctttagctccttgggtactttctctagctcctccattgggagccctgtgatccatccattagctgactgtgagcatccacttctgtgtttgctaggccccggcatagtctcacaagagacagctacatctgggtcctttcgataaaatcttgctagtgtatgcaatggtgtcaacgtttggatgctgattatggggtggatccctggatatggcagtctctacatggtcaatccttttatctcagctccaaactttgtctacatagtgcctcatagatatttataaattatatgttattcttttaaaaacatgactagttaacacttgttagggaggcagcttagcacttaaagcccttacacacaaccaaaaggaaatgagttcagattcccagaatccctcctgtaactcaagcctcagaaggctgagaaatatcatttcttgagcaacctggctattgaaactctctgtatcagtaagctttgaatttgattgagagaccttgtagtttgaatatgcttgacccaggtagtgacactatttgggggtgtgaccttgtggacataggtgtagccttgttggagtaagtgtgttactgtgggtgtgggcattaagaccctcatcctagctacccggaagtcagccttctcctgtttgccttcagaacaagattttaaactctcatctcctcctccgccatgtctgcctggacactgccatgcttctgccttgatcataatggactgaacctctgaacctgtaagccaaccccaattaaatgcttctcttataagagttgtcttggtcatggtgtctgttcacagcaataaaaccctaactaagacagaagttggtatcaggagtgagtattgtcatgataggcttgaccatccttttctttggaagaatgtagatttggggactttggatttggaaagctttggaatgctttaagtggaacttaatgggctattctagtagaaatatggaagactttggtgctgagggtgatttgcactgttgaaactctagaggtttcagaggagaagaatttcagtatgtggccaagagactgctactgtaaaattttgaagaagaatgtgtctgctttttgccattgtccaaatagtctgcctgaggctaaagtgaagagatttagattaattgctttgacaaaggaagtctcaaaacagcctggtataaattccattgtgtgattactaaagttcactcctatgaagaggcttttgatgaagcacagcaagctctaaaaggaaaagtacaaagtgtacagtaataaaggggcaccaggaagtgaaatggagctgaatgctatgcttaagaaggagtggtgactttggggcaagatcccacccagcgaaggtaggtccaaacatgatggtaatacatcttaatccaaagagacagaaggaagcagatctttgagttcaaggctagcctggtatagagaaagtttcaagtagagaaaagcttcagtccaggcatggtggtacacacctttgaccctaggattcaggagacaaagccttttagatctgtgcaaggtcagtctaccaagcaagttccagaacagccaagcttaggccatgaaggagttagaaaacagaaagctggtgataatttaataaaacaagttcaagctcaagcaagcatcagaacttggcagcttcagccatgtggctctggctttagagtcaaaattagaaggggctactaagacaattgatgctggttagctggagctaagaacttagtggtgattaagaagagaccagtgactgaagtgaaatcttggaagccttttgtgagagcacaaagaatctgtgttccagagatagccagagttgtacccggtgctgcagctgaacttgtagtgtgtaagaaccacccaggtagtactggttttgaatgtatgaagcagtcatggacagcagctgaggcttggcactgtgagaggctagggaaggcctggtactgaaggtgtcattcaaagaagttgaggcttggcaccatgaagagagcctatgagaggttattgatgaatcctacttgcagcaggaaagcccagcatattggagatgccagtaccatgggatgaccaccaaaaaaaaaaaaaacccacagcagcagcaatggattggagtcaaccagagcctagagtgctatagagggcagagctggagaagtgttgcaagccctttggaggatcatgtgtggattccagacactggaataagaagctgaaacattgaagttgccttggagacccaaagatgttcaagatgccagagctgtaggatatctgctgagaactgctaacagagtggaaccagcccaggagaaagaaatttgttgcagtcaacaaagatgaaaaaggagttagagatctgaagacctctttgacatcagatatggagatgcagagtttagagtttgcccagctggcttactgtcttgctttggggattacagttaagtgattgaatgaatctcagaaaatactttgtactttgtacttttaacattgttgagactgctatagactatggggactttggaagttggactaaatgtattttttattatgctgtggctagatatggcccccatagactcatatgttttaacaagcctatgggggccagggagtggaatgtggtggttttaatatgctggcctagggagtggcactatttggaggtgtggcctatttggagcaggtggctcactgtgggtgtgggctttaagacccttatcatggatgcctggaagccggtcttctgtgctgttggaacaagattttaaacccagctcctcctttaccatgcctgccttgacactgccatgctcctaccttggtgacaatgggctgaacctctgcacctataagccagctccaattaaatgtttttcttataaatgtgccttgattgtggtgtctgttcacagcagtaaaaccctaagacagaccttacctctgaagatgacgtgggggagtaattgaatgagattcctggggctggagatatgattaagagcacttgttgttcttgcataggacctagggtttagttcttgacacccacatggtggctctgctcacaaccatctgtaactccagtttcaggaaatccaacaccctcatctgtcctgtgaaggcactgcatacacatgatatatagtcatatattcagtcaaaatactcacagaataaaaataaagacatctttttttgaaaaattaatttattttttacactcaatattccattctctgccccctatgcaccctccgactgctccacatcccacacctcccccagccccgtcgccacataaatgccacccccccccaccccacctgacctctatactccctagggcctccagtctctttttttttttttccatttttattaggtatttaactcatttacatatccaatgctataccaaaagtcccccatatccacccacccccactcccctgcccacccactccccctttttggccctggtattcccctgtactggggcatataaagtttgcaagtccaatgggcctctctttccagtgatggccgactaggccatcttttgatatatatgcagctagagacatgagctccaaggggtactggttagttcataatgttgttccacctatagggttgcagatccctttagctccttggctactttctctagctcctccattgggagccctatgatccatccattagctgactgtgagcatccacttctgtgtttgctgggccccggcatagtctcactgggcctccagtctcttgagggttaggtgcatcatctctgaatgaacacagacctggaagtcctccactgtatgtgtattgagggcctcatatcagctggtgcatgctgtctgtttggtggtccagtgtttgagagatctcaggggtccagattaattgagactgctggtcctcctacaggatcaaccacaagcctcaaaagtacataaatggacatacacacaaagaggtatgcatagatgtatgtatgaacgaacaaatatgcatgcatattacacatatacgtatgtaaaattaaaacaagtgttcctgtatattatatgtatatagtaatattttgagctatgctcatgatctcaataaatgtcagaatctttctggatattgaacaaaaggtatgcacatcatttttgcttgtttctgtgttttaatagcttctttaaaggtgtgttatataataattggtttgacactgccctggttagttttatgtcagtttgacataagatagagtccctggagatgagggagcctcaattgagaaaatacctcaataagattgggttgtaagcatgcctttagggcattttcataattagatattgatgtgggtgttgggggtcagctattcttttggggccacctccaggcagataatgctgggttctataggaaagcaggctgagcaagccatgaggaacaagccaataagcagtgttcctccatggcctctgcatcagctgctgtttccaggttcctgcactgcttgagttttggtcctgacttcctttgatagtgatgtagaagtgtaagccaaataaacccttccctccccaacttgcttcttgatcatagtattctgccctggcaatagaaaccctaagacagacaccataaggatgagctagctatcaacttgattttagattatgaaagttaggggaagaaaaagtcctatgcaaagtccactaaccaccaccaccaccacacacacaaaaaatggaactttagcacaaaaagatattagaggattcttgaaagtttgtaatatagtatatttaccctttacatgtctcttgcataagcatgaggacttgcattcagattcctagaacccacataaaaagtccaaaaatgactgaaagccaagagatggaaaagcagagacaggaagattcctggggtttgctggctcaataaactttatgttcagtctgcctgaacctaaagtaataataaataaataagttggagagtgtggtagtttaaattaaaatggcccccataaacgcataggaagtggcactattaggaggtatggccttgttggagtagttgtggctttattaaaagaagtgagtcacaagggtgggctttgaggtcttagtttaagccaggcttagtgactcacagtctcttttgcctgaggatccagatgcagaactgttagctccttttccctgcatatcatatgcttcccatcatgatgataatggactaaatgtctgaactgtaagccaactccagttaagtattttcctttataagagttgtcatggtcatgatatctcttaacagcaataaaaccctaactaagacagagattgaccaaggaagacaacatgtgttaacccctggcctctacaaccacatgcacactcatgcatgcacacttacgtgcatgcacaggtgcacacacccaaatggacatgtacattcacaacatactatgagtacaaaaacacaaagacagatgtaaaaccaaaaatggata

SEQ ID NO: 1193 - DNA, 1561 bp, Mus musculus
gccttgttttctttggagtcgaaggttcctgcaagtggaaaacttcctggagctgacctactaggtattgaaccagtttctgcattgctgaatcaatctcccaagggtaattccacagaaatcccaggggcttggagtaaacaagaccgcgcctagcccagctagaggaagttttattccggaacccagcgccatttctgggtgggactgctttctacaccatttgccgtaaaacgttgtttgagaacggtgtgaggggaatggaggtctcttctcggagttcagagcctctggatccggtgtggctccttgtagccttcggccggggaggagtcaagctagaagttttgctgctgttcttgctgccatttactttgggtcactgcccagccccatcacagcttccttctgccaaacctataaatctaactgatgaatccatgtttcccattggaacatatttgttgtatgaatgtctcccaggatatatcaagaggcagttctctatcacctgcaaacaagactcaacctggacgagtgctgaagataagtgtatacgaaaacaatgtaaaactccttcagatcctgagaatggcttggtacatgtacacacaggcattcagtttggatcccgtattaattatacttgtaatcaaggataccgcctcattggttcctcctctgctgtatgtgtcatcactgatcaaagtgttgattgggatactgaggcacctatttgtgagtggattccttgtgagatacccccaggcattcccaatggagatttcttcagttcaaccagagaagactttcattatggaatggtggttacctaccgctgcaacactgatgcgagagggaaggcgctctttaacctggtgggtgagccctccttatactgtaccagcaacgatggtgaaattggagtctggagcggccctcctcctcagtgcattgaactcaacaaatgtactcctcctccctatgttgaaaatgcagtcatgctgtctgagaacagaagcttgttttccttaagggatattgtggagtttagatgtcaccctggctttatcatgaaaggagccagcagtgtgcattgtcagtccctaaacaaatgggagccagagttaccaagctgcttcaagggagtgatatgtcgtctccctcaggagatgagtggattccagaaggggttgggaatgaaaaaagaatattattatggagagaatgtaaccttggaatgtgaggatgggtatactctagaaggcagttctcaaagccagtgccagtctgatggcagctggaatcctcttctggccaaatgtgtatctcgctcaatcagtggtctaattgttggaattttcattgggataatcgtctttattttagtcatcattgttttcatttggatgattctgaagtataaaaaacgcaataccacagatgaaaagtataaagaagtgggtattcatttaaattataaagaagacagctgtgtccgccttcagtctctgctcacaagtcaggagaacagcagtaccactagcccagcacggaattc

SEQ ID NO: 1194 - protein, 474 aa, Mus musculus
  VARIANT (1)...(474): Xaa = Any Amino Acid
TRPRLAQLEEVLFRNPAPFLGGTAFYTICRKTLFENGVRGMEVSSRSSEPLDPVWLLVAFGRGGVKLEVLLLFLLPFTLGHCPAPSQLPSAKPINLTDESMFPIGTYLLYECLPGYIKRQFSITCKQDSTWTSAEDKCIRKQCKTPSDPENGLVHVHTGIQFGSRINYTCNQGYRLIGSSSAVCVITDQSVDWDTEAPICEWIPCEIPPGIPNGDFFSSTREDFHYGMVVTYRCNTDARGKALFNLVGEPSLYCTSNDGEIGVWSGPPPQCIELNKCTPPPYVENAVMLSENRSLFSLRDIVEFRCHPGFIMKGASSVHCQSLNKWEPELPSCFKGVICRLPQEMSGFQKGLGMKKEYYYGENVTLECEDGYTLEGSSQSQCQSDGSWNPLLAKCVSRSISGLIVGIFIGIIVFILVIIVFIWMILKYKKRNTTDEKYKEVGIHLNYKEDSCVRLQSLLTSQENSSTTSPARNX

SEQ ID NO: 1195 - DNA, 141503 bp, Homo sapiens
  misc_feature (1)...(141503): n = A,T,C or G
aaaaaaaaaaaaaaaaaaagccagccatgtggccatatgagggaggaggattccagaaagaacagtaggtgcaaaggccataaggcagtgtgtgccagctgtgttggcggcacagcaaggaggccagtgtggcctacagttgtagagatgaagtcacagagatgggggtgggatgtgggcgagaggatgatcgtacaaagtctgctatgtcattgtaatgggatggtgggcaggagaggatgattgtataaagtgtgctaggtcatggtaaagagattggtttttatttggaagcttttaaggagaggagcaacacattcaccttaactgctgttaagaacagactgtaggaagccatgggtggaagatgggagtcaatgaggaggctgctgcaatcatccaggcaagaaattgtcagtggctaccaccaggttgtaagaagaggccagattctgcatgcaattttaagacagtgacagtaggatttgtggatagtttgtatcagaatatgagaggaagagagctgtcaataatgacacgagggcttttgcctaagcaactggaaggatagaactgccattaattacatgattgagattgcaaagagcaggactggggagaaaaatcaggagttccactgtggagatgttaaatgtggatgtctaatagacttggcaagaagacagctgatgtacaagtctgtattttgggcaattggtccaggctggagataaaaatttgggctttgtcatcatgtggatgtacataacaaggagactgaataagatctccgggaagtgaaagaggctagcaaaaagaaaaggtccaagtactgagccctggatcctccaacattagaagtcatggagtgagaaggcacccactaagaagtgaaggagcagcctctgatactatccagagaagaaccttaaagtcaggcaaagaaagaattttagggaggagggagtgatcaactctgtccagtgttgctggtaggccaaaaaaatgagccctgaaaactgaccattgaaattcagtagcacaatttttttgctgttgttgtttgagacagggtctcactctgtcgcccaggctggagtgcagtggtgtgatctcagctcactgcagcctctacttcctaggttcaagtgattctcatgcctcagtctcctgagtagctgggattataggcaagcagcacaaaatttgctgctgaacttgacaagacagtttttgaagagaggaaggaggcaggagcctgactggacggagcttaagagagaatgaaaggagagaaattgcagctatcaaatacagacaactctttctaggtttttttctataaaaaggagcaaataagtaaagtgctagtaagagtaaaacataaagtcaacagaaatattttttaagattggagaaatagcagttatgccctattcctacatgatgatgggaataatttagtagaaagggaaagagtgatggcagaaagagagagaagaattgctcgaacaaggtctgggtaagctaggaggaacagattaagcagaggagctcctagctgcgtgggcttagtaacaggagggagggcagaatctgcaggtgcagatgaaggcaggttgggagctgtgatggggagtgaacgtgtggaagttctcttccgatgattcagtcttctcagtgaatagaaagcaaattattcagctgagagtgaggctcagaaaggaggtattagagagttaagaagaaaaaggaaggcattaaatcatcaactaagaactgaagactgaattatagggagtacagaaaggccgacaggccacatgagatgtgcacctgagtttcccatgagaaagtggggatgaacatttgaaggtttactctgtccggggattatgtgacagtctttcatgccttctcttacttagccatcagtaccactttgaaaggtgggtgttctcccaagataatatcaagatgaagaaataatatccaagaaaaccttgggcaaggtctcagggtcaatcattggcaaaggtggaatgcaagctcatgtctgagtttaaactgctttctcctacataatctagaaaataaagataccagccaggagtggtggctcacgtctgtaaacccagcactttgggaggccaaggcaggcagatcacgagttcaggagatcgagaacatcttggccaacatggtgaaaccccgtctctactaaaaatacaaaaattagctgggtttgatggcacgtgcctgtaatcccagctactcgggaggctgaggcaggagaattgcttgaaccagggagttggaggttgcagtgagctgagatcacgccactgcactccagcctgctgacagagcgagactccatctcaaaataaaataaaataaaaaatataccacctctgtcctcttggaacttattttaataagataaataagacccataaatatcataggtaataatacataccataaacaaggtatagaaaatctgtgatggcagttgaggaagaaaaggtaacctgctgctggtgagtcctgacagggggaccatactagtgacctctaaatccaaaccagttgaggtacagagtacacctagctcataaatatttgttgaatgagtttatgaatgagaaagattagtactttcatttctcatttagtttaattcatgtttatatgaatgtatataaaatgtagttatttgttccagagcatgttatatgaagaaaggcctttcaatagaatgatatcttctaatagacttgatgctttgttggttataccagctgtaactggtatgtaaagagaatgttagcattatttaaacttcgagttgcaccgctgctattcatgctgcctcctaaacagaaatgatctatttcagtgtgcctcattgcttggaattcagcggaatattgattagaaagaaactgctctaatatcagcaagtctctttatatggcctcaagatcaatgaaatgatgtcataagcgatcacttcctatatgcacttattctcaagaagaacatctttatggtaaagatgggagcccagtttcactgccatatactcttcaaggactttctgaagcctcacttatgagatgcctgaagccaggccatggctataaacaattacatggctctaaaaagttttgccctttttaaggaaggcactaaaaagagctgtcctggtatctagacccatcttctttttgaaatcagcatactcaatgttactatctgcttttggttataatgtgtttttaattatctaaagtatgaagcattttctggggttatgatggccttacctttattaggaagtatggttttattttgatagtagcttcctcctctggtggtgttaatcatttcatttttacccttacttggtttgagtttctctcacattactgtatatactttgcctttccataatcactcagtgattgcaatttgcacaagtttttttaaattatgggaatcaagatttaatcctagagatttggtgtacaattcaggctttggatgtttctttagcagttttgtgataagttctagttgcttgtaaaatttcacttaataatgtgtacattagtcattcaataaattgtaattgtaaagaaaacatacaacacttgccttattttgttttttttttggagtcaatgaactcttcgataacagagagtcttagggctttaaagtccacgatttaacagttattcattcaggatcccatcacttggtcgttttagccaaacttttaacccacaaattcaatttcctcaccctcaagactttctcttatatttgtccagccaataccttctccggctcactcatcctctcccaccacacccttgatatagatatagctgttaattttctctgttccaacatttaaactattgagaaaataaaaccttgctcactggtgaccacaaatttactctgtaccttcccctagactaggtatgctgttcagcatctgttttttttctgttttttaaaattgtgattaaaaacacataaaatttaccatcttcaccatttttaagggtacagttcggtagagttaggtacattcacattgttgtagagcagatctccacaactctttttctcttataaaaccaagattctatatccattatatagtaactccacattcccccatcccttcagtccctggcaaccaccattctgttttctgtcgcaatgaatttgactactctcagtacctcatataagtggaatcatacagtacctgtccttttgtgacttatttcacttagcataatgtcctcaaggttcattaatgttgtagcacgtgtcagaatttctttcctttttaaggaaaggaagaaattcattgtgtgtatatgcaattttgtttacattttgtttatccatttatctgtcgatagacattaggttgtgtattagtctgttcttacattgcaatatagaaatacctgagactgagtactttataaagaaaagagttttaattggctcatggttccgcagactgtatgagaagcatgatactggcatctgctcagcttctggggaggcccccaggaaactgacaattatggcagaagatgaagagggaagccaggcatgttttacatggcagaagcaggatcaagggagagaatggggaggtgccacacactagaacaacaccaaggggatggtgctaaaccattcatgaaggatccaccctcatgatccaatcacctcctaccaggtcccacctccaacaactgaggattacaattcgacatgagatttggatgggaacacagcgtttttctgagccctccatatttttccaacctctgcctgttacccaattccaaagttgctgccgcattttcaggtatctttatagcaatgacccactcctgggtaccaattttctgtattagtttcttcccacattgctataaagaaatacctgagactggataatgtataaacaaaagaggtttaattggcttatggttccagggtctgtacaggaagcatgctgctgacttcttcctgccttctggggaggccttgggaaactcacaaccatggaggaaggcaaaggggaagcaagacatctcatacggtgggagcaggaggaagagagagagggggcaggtgctacacacttttaaactactagatttggtgagaactcactccctacatggtaccaagctaatccattcatgagaaatccaccttcatgatccaatcacctcctagtaggcccctctccaacactggagattacaatttgacataatatttggatccaaaccatatcaggttgtttccatctctttactattgtgaatagtgcttccatgagcatgggtgtgcagatgtcttttcagacattgcctcaattcttttggatccatacccagaagtgggatgctcttcagcaccttttattcgtgtacagtcagcaacactttcatttccccacattgtctgttcactcacctcgagccatctactctattctacattcattcattcttccttctattaagggatgatgaaaacatccgaaggtaattctcttaacttcctctccctccaccttccatcctatctacatccactcacccttaccctcatgtctgtcttccacttttcacagcctatatctttcactcttcatccctttctgtcttttccaggacattgttccttcagttagcccctctctcatcattggctccttcgttccacctccaaaactcctgaagccaagacctgctgagctgcatgtgacagaaatccacctcacactggcttagaccaaaaatgaattttgctaaatcacatgacagaaaagtccaagcatgtagctggcttttgtcaaaacaggaatagtcaaagggtgccttcaggaatatcttctccttctgctttgcctggctggcttcattctctggaaaaaactccctaaaaactggcaaaatatttactgatgatgcaacatgcacgtctcatcagcttagccttccagtacaaagagcctctcgtccaataagtctttcaaaagtcccttcaatagctttcattctccaaatagggttacatgcccccaaaggaaacaataactaggagcaggacagtgaaataaacacagggcaaggcctgagttgcctgcccagccttggagatgggggtagggttggtctacctcattggttctcaggtgggatgattttgccctcccaaggacatttggcagtgtctagagacatttttggttactacaactgaaggacggaagggtttccagcctctagtaggtagaggccagggatactgccaaacatcctccaaggcaaaagacagccctccagaacaaagaattatctggtccacgatgtcaataatattgaggtcgagaaaccatagtcttccagaatcacattgaactatgggaaagaggggatttcccagtggaaaaatctaggggcaaatcccagaggaagggacccatttagagcaacagatatccaccttcacctccatctgaaaaaaatcttcccccaaaccatctatgtttctcgtttaaactacctctcttacaccaaattttctgaaagagtggttggccttagctgtctcaaccactgtagtcattcattcaagtgatgataattatggagctccttctgtgtgctaagcattattttaggtcatgggatttggcagtcgtaaactgacatgttctcatgcagcttttattctggtgggagagacacacaataagcagattttcagttggtaataaaatgaaaaaatgataagtataattttttaatctatatgaaacaggcaaaaaggaaaggaagttctgaattaatgtgcaattttaaatagtggccaaggaaggctccattaagaaggtctcatttgagccaaataactcaaggagatgaggtagtagccatgcagagcgatatctgggcaaagagcattctaagcaaaaggaatattaaatgggaggaaaaaactgaagagaaaaatacacctgctgcacttggagaaataatttgtttgcaagctgatggtaaaaatccagcagaaagaggtgtatgatagtgctggaggaagtgagaattgctggtttccttgagtgagtgagagcaaatcgaatctagggcacaagtggagagatcacccttagacttagactgtgaacagtataattatattaacaggagagacggaggtttcatgggccaaatacaagaatttgggtggagtgatggtagaaaattgtagatctatttgattgtttctattttctcaataaagaaagaaacaaagccattcacagaaattaagaatgttggagaaggtgtcagaaataaatgtcaaaataaaaatatgaaatagtcatttaggagaatgggagaataaatggattagacaaacaatagtgggaatgtcaggcagaagtataatggtccatttgaaattatttgttactaaagtaaggctagtcattgtggctatgtgtcttttccagccacattcagtttcacaggtatgacagcaaaataatggagaattgattctaaccagtaatgttgttttgtctaatggctataataacccaagagaagggtgagggagctaacagtgggtgcaagatggtgattataaagacagagtatggaatttaacctggtagtgatgaaagtgaagacacaaaggaggtgagaagctgagagagatagcggtaggatcaatgggctgcaggcactgagacagacaaagattgctggattcagtttaacgttactagggtaaaagaaaagagttggattggtggttagagagtgggatcattgaaatcactgagaggttgaaagtgacaagtctccgagcatgcacatgagcattagagtcagaggagagtggaggacaagaccacaggcagagaagaggtcaaggcactggaaggccagggatttgaaaatactattgctgtgaatgttgaaatcaccaggaactgtggcagaagtaacagtggagaaggtggccatgagccaggagctcaaactttcaaggaatgagggagaaagtagatactaggagatggataccagcagaagtggtaaggagtggcaccttctgatagcatgtgatgtaaaactggggaaatgagccttctcctcttctcttttcctaagcctactacaatctggctgctactcccattactctgttgagaataacttgaaatgatgatagcaaatccttaaaagaatgtcactggatgtactaaaaactgtgataagtgatatgatcaaagtagacatttcttccactagaattttgggaggaagcctaatggaaaccaatgcgcacagaaagacaaatgctgtatgttattagtcatatgtggactctaaaaaactcatctcatagaagtagagggtagaatactggttaccagaggctggggaagggagagacaatgggagatggagagagattggttaaagggcacaggatcacagatagataggaggaatacattcatccttgaatacttaaccctctgccctaaatctgtcagtcctacatccatacttcttatttcagtaagtagcaccaccattcatttctaatcctggggctaactcttttttttttttcttttctgaatcatgtctccttttaatggttaaggaaaacaagtttaacataaaattagcaacaacaacaacaacaacaacaaaatcaaggtttaaagtcaaaattattttaagagaaaaacccaggcaaaatagcctacctacagacaggcagtacatgtcagaaggacaggccacccccaataaaaaagataaaatattattttttctaccttttttaaacttaattatttaattatttctttcttttttcttttttttgtttcttttttttattatactttaagttttagggtacatgtgcacaacgtgcaggtttgttacatatgtatacatgtgcgacgttggtgtgctgcacccattaactcgtcctttacattaggtatatctcctaatgctatccctcccccctccccccaccccacaacaggccccggtgtgtgatgttcctcttcctgtgtccatgtgttctcattgtggaagctggaaaccatcattctcagcaaactaccgcaagggggctaactcttgattgctttcttctcaccaccaaccttaagaaaggaagtaaccaaaatccaatacatgagcaactgttcattccatctccaatatctttgttaattgtccactttatccacccagtcagggccgccatcaaacctcacttggatgtcggcaaaagctcccctgactggtcttcgcagtccattattgccctattctaatctaccttccatactatacacagatttacattttttaaatgtgtatctaattgtccctcccttttaaaaaatcttacaatggcatgacgtctcaattcagggtaaggaaattgtttcttcacattccctgtacaccgtacacatcgcctgcaattgcccttcaacacggagagcaggcatttcattagctgaccttcccacacacattcttgcaaagaggaaaagttaagcagggtgtttggaggcgagctgccatcatccaccgcctttgtctggaagcgcagggcctcacacgcgggatccatcggaagcccgagcattgtcaatctctgctgctgcacctgggtcagcaaggtgggctctgccaagcgaaactcgttagaaacaatgcaaatggggagtaaacatgacctcgcccatgaaggggaagctgtggtcaaaagcattttgtcccggaaccccgcagccctccccacactctgggcgcggagcacaatgattggtcactcctattttcgctgagcttttcctcttatttcagttttcttcgagatcaaatctggtttgtagatgtgcttggggagaatgggggcctcttctccaagaagcccggagcctgtcgggccgccggcgcccggtctccccttctgctgcggaggatccctgctggcggttgtggtgctgcttgcgctgccggtggcctggggtgagaggcgggcgggcgtggggaggcgcccgggcggacgaggaacccggggccccgcagagaactcgcgtgcagcgctgagctgcgctgctctgcgcgcccgggtccgaaggcagcgcgatgggtgggctgagcgcgcgacccggcagggcggcgggtgtaggatccttctgcgcactggagaccctcggtgcttctgggtaagcgtggagttcccaggtgcaggggcttaagtcgtgacgagcgcagtggaaggcgcagatgctgagcgggtgccgcacgaaattccttgcctttgtgtattcacagcctcggctggctatagccaagacgtggcgttgatcctagtgaaagggaacttggggatccgacaaacctgagttctggtcctagaaacttaactgtgaggcaacttagcacacctgagtctgtttgctcttctgtaaaatggggacactggtatctctgcatcgtggagttgctgcctcagtggcattaagcctgtcgagtatctaacacagggctatgtgtccccgagtccatttctatcccccaaccgttacctctgtacttagctcccaatggtgtttagacaagcagtcctagggatgcaggtgttacctgacaactgccccgcatggaactgtcctcgccccccacaccaagccaccacggccatcatcaccatgcacttaattgacagcatactttaagacagatgcatgccaggcacttgcggattagaagagcaagggaagccccagaacatgcaatgtaaccgttgcaggtagaagggacagtagatatgtttacagttcgcattttagtgatgtgtttagtacaaaataacgcctattataattattatggaaattttgaggccacatctcttcctttttcttaacttcaaataggtaaacatcttcagttagaacccttctattattatttttcggctccccagaagtcttcttggttgcctagactcactggcaacatctcatttgaagtgacagtcttggttgtttttgtccagcctattcctgacaactccgggttcgcccttctctgccactagacattttacattcattatttgagtgttccttcttctctaaaagagtaaataaaataaaataaagtagaaccaagtcccgcaagagttgttattaatatttgatctccttaggcaccagaaagtaacctgtcaggtgcagagatgtgataaaacgtacaatcttatttttaggagagaagcatgcccagtaagttaagcaatctgttgtcaacgcttaggaatttgtgtcatctttgggagtactggccctcttcttactagaatgttgttttacttagcctatgttgattaagttactgttataaacaatcccagacactattaattgcaaaaaaaaaatttactgaggttatcacaataacttccaaatgtgaaacagcctaaactaaactacctagaaattttgttgctgacataatttaaattttaaaatgctgatggatgcttccagtgtgcatggtcctttggaattttaaagaagtataagagctctgcacccaaagtgtatgcatatagaagtaggtggtggagttttatgaaatctacttattaggaagccagcgttctgctttttccagcctctgctacttaccagctggtgtcttggacccagtaagttaagtcacatcactgaccttcagtgtccacatgtataaaatgagcataactgacatcctgatctctgagagagacgttttgaaaatcagatggtgtaatgcatgtgacagtgttttgtaatctgaaaacccccatgcatgtctgaaaaaccatgactaagaagtcgtgcaagactgcaggatcaccgaaaagcgagaaatctcaactcctatgatcaggaaaggatgagtgaaaggtatatggctttactagcacttaaagagtgaatctagaaacagattgcatacgacaaaaaatagcagaggagctaggattgttttgttattatgagttactcacagtacccgtaaagtggtatagtgctatttgaaagaggacttagattagctgcaaatagatattgcaaatgtaggacaacccctgaaaaatgtgaaaaaaagaactataatttatatgttaataagtaagagagaattgcatcatataaaatgctcagttaaaacaataaagatggctggggacagtggctcatgcccataatcccagcactttgggaggctgaggtgggtggatcacctcaagtcaggagttcaagaccagcctggccaacatagtgaaaccctgtctctacaaaaacacaaaaattaccagggcatgatggtgggtgcctgtagtcccagctactcgggaggctgaggcatgagaatcgcttgaacctgggaggcggaggttgcagtgagtcgagatcgtgccattgcactccagcctgggtgacagagcgcaactccaaatcaaaaaaaaaaaaaaaaaaaaaaaaaaagaaacaaacaaacaaaacaaaaaacaataaagggcaggaaaagaatggaagacaaaaaatagaaacagagaacaagagaaaaaaagcaacaaataaaaaccagtaacaaaactaaagcaactatatcaacaatcattttgagtgtcaatgatcgaaatgcaccatttgaaacagatcatcagagtggatcaagaaacaagacccaactatatactgtgtacaacaagaccgttttaaatatagacaatatatatgaaaagtaaatggataaagatataccatgctaatgctagtcacagaaagcaggaatagctgtgttaatttcaaacacagcagacttcagaccaagaaaaattattagggataaagagggacatcatataatgataaaggggccaattatccaagaagacgtaacaatatcccatatgtatgcacctgatggagagacaaaatacgtgaggcaaaacccatagaactgcaaggagaaatagatggatttactatcatagttggagacttctatgatatctttctgatatcagaaaaggtgctgaagtctccttatcagaaatgggcagattcagcaggcagaaaatccgtaaggacatacttgaattcaacagcaccatcaatccacttgggtataattgacatatatagatgacttcatccacaacagcagagcacatattctcccgcttacattcatggggatagaccacattctgagccataaaatagtacacgaattaagctttaccaggcagtgtttaatatagggtggactctggcgccctcacgtggtcctcatataggatctggtttggttatccctgctaggttaaggtgcaagatagaagggaagttccaatttgctttctgtgctttgtggtgtattttggtttacatatgctcagatgagtggatgtgtgatttatattatctattttaatctaaaataagcttcacatttggacaggtaacatcaaaagtgtcctacacagaaatgctgggtgaagatcccagtaataaaaccaactccagaaaacaagaaaatggtagagttgacaatccctctcaccctctccgcaaagacacatgtatacacattttttgtcagaggcattaagtagaagaaatgctgtcagtctaatcacaactgatcacaactcgatgaaaccaaaaaacctagaaagtatcatgaagactgtcgaaataagctttacattcactattgtgaacagagagactcaatgtgactgttttttgtcccgttagatgttagctaatgattgtgctaagtcatgatgattaacaaagcatttaaaatatttattttatctgtgttacatttcaaaaatttatattgaggcatataatttatgttcgcgtacatatataatttataaatttatatatttgaaagggcatgctctttttttaaactgatagaggtgcctaagcaaagcaagtgcaaatctattccttaaagggtaagtatgcagaatggaaagcagagtgttctttgggttgacagctcatattgcaacagacatgaaagtgatgatgtgttaattgtgcatatagcacagaatacatcaacttgctttgaatggaatatctgaaccaggagaatgtgaaagtgggctgagtcatacaagacaaaacccgaaatgagataacaatacatacccactagaatggctaaaatgaaaaagattgaccgagccaagtgttggcgataaggtggagtaactggaattataatatactgctatttggcaggtaaaattataacattaactttagaaaatagttcaacagattcttaaaaccttagacacacactcaacattttactcttaggtttttacccaagagaaatgaaatcatatgtccacacaaagacttgtacatgaattttcatagcagttttgtttgtaatagccaacacgtggaaacaatccaaatgtccctcaacaagtaaatggataaactaaattaagatatatttatgcaattgaatattacccagcaactaaaggaaacaatttgtatacatgcagcaacctagatggatctctaattatgctgtgtgaaggctaaaccataaaaaaaaacctgagtgatttcctttatacaataggatataaatgaagtgatttaggttatatgaaattttagaaagtcaaatcaatctgtagtaagagaaaaccacctgagttatttcctttatatgataggatataaacgaagtgattcgggttatatgaaattttagaaagtcagatcaatctgtagtaagagaaaacacattgaaggttgcctagagaaggaagtggatgtttggatggattacagaagggcatgagggaactctgtgtgggtgggatgtatgatggaaacgtttattgtcttcattttggtgatggtttcacaacgcatacatatgttataagtaatcgaattgtacacttcaaatactcatcaatcattgtatgtaatatatcttgataaagctataaaaacttttaaaattatggtaggtcttcagtttgtggattttatattaatatatttgtcataggaactagtcacaattgagggattggtaataaaggagagaaaggaaactacatcaagctttctttgttgaaggctcatatattccttttttgagctattatacaactttgctttttataattacctatactattcatatactactatgcaggtaagaatattatgtaattaaggggaaggaacttctttccaagaatggttcattcaatttgctttgttactttaggtctcattccttcctctcgttgcaagctttgctgtgacatttaccctctctcaatacagcttttggcgctaggcacttcacatggaatctcttcctttgtccggcatcaatggataagacaaatatcaaaattgtatttcatcccacatatcaactagaggaaaggtgaatgcataacactgaaaataacagcaactgttttactcagtgttttttttttttacagtatcctcaaagtgctgttatctatcaaaatcagctgtgaaaatttttaaaaatagactcctgggccctaacctagacccactaaatcagagatttgggggacatagcttggattcttgatttttttgagttttataagtaattcttcattttttgttcattgcaacaaatatgcattgagttcttataattgagtgttaagcaccaggactaagtattaatttagaggtacaaaaaaacacatcatctcttgcctttaaattatgcatatctaatatctattgagagaaatagatacttctaaaagcacacaaagataaaaagcacaaattgtaataacaaacaattattgatatgaaaggaaaagcaaagtgtcggactagaaattattatagggtggggcagagggaagtagtttagattccaaatccctaagagggtcagggaaggcttcagatgagattgggtgtgttcagggtggtatggccataggcaggctggggaaggcttctataagaaagtgacattttagcagatgcctgaaggaagaattgaagtcagagtgaagataaaattgcgtcacatagaaggaatgtcatagacgggaaaaatgtgtgtctttgggaaactgaaaaaggggaaagggccacaccttggtgaggggaccaagtggcacaagatgaggcagggaacatagacaagggcttccttgcttaacaactgctggcttaataaagcaaatgtgtgatgatggatacaggctgtctgggaaaaataagtaagaaatatgagctttcttggagcatcatcctttgcttcagtagaaagcacagagttaggcttccaattctgactaaagccattgacaacagggaaaaggcaaccttaggaattctcctctctgtccggggtcccgtgggcactatgatggagctcatgagatgcagatgagaagtcccaggctgaatccggggcacattcactcaggagagctgaggtcaccagtcactgaggtcatccagtgcattcccgacagcataggctcattccaagctagttctgcaaaggagcagaaaatgaactcttggaagcaaagcaagcactcccactttagcggaataatcgaatttaactcttagaagtccccttacccttttctaagggtaataatcgtaagtataatttatgaagtgccttctgtgtatgtggcagcatatactacttttgattctccctgcaaacctggtaggaaaatattattccctttatgaagatgaaactgaggctcagcaagattaagcggtttgcctaagacctcatagccattaagtagaagacattgggttcaagattcaatctatgaacccaacatttttaatactatataccattctctttttgtattaatttcctattgctgctgtaacaaatttccacaaacttagtggcttaagacaacagaaatgtattctcttccagttctggaggccgacgtctaaaatagatccatagggctgtgttccttgtggaggctccaggggagcaggggttttcttgctctttccagcttccaggggctgcttccgtcctttggctcttggcctccttcctctaccttccaaaccagcaccatagtgtctctgaatatccttcttctgtctcctttcaccctcttgcctcccttttataaggacccttgtgatcacatttaaggtccacctagataacccaggataatctgcccatctcaagattcttaatcacatctgcaaagccctttaaccattacaggtaacaatcacaggcttcagggatcagaacatggatatctctgagaggtccttacttagcctaccacacctttccatatagattctcaaaattttagctgagcctaataagggagttcattaccattagggtccggtttagtagcaagtgcttcctttaagtgaaaaggtgaaagttgtccacttaataaggaaagaaaaacattgtatgttgaagttgctaagacctaaggtaagaaggaatcttctatcgatgaaattgtgaagaaggaaaaataaatttgtgctagttttgctgtcacacttcaaactgcaaaagttacaaccacagtgcatgctaagtgcttagctaagaggggaaaggcattaaatttgtgggcggaagaggtgaacagaaatgtgttctaattgacagctgtcaggtttggtactatctgaggttttgggtatcggctaatgtcttggaacatgtcccccaaagataagtgggtgactactgtatattcaaaataagcatttatatactggggagtaaatctcccatgttatttgtgttttatttgtcccacaaataaagtaaacaaagtagaattttaggcaagattcatttctagaggcagagatattttattataataaagaaggttgctctaccataaaatatagcaatttaaatttttataatcctaataacctcaaaatatataaaataaaagatggacaacattataaaaagaaatagacaaatgtacaataaataaaatattttaacacaactcatttagtatctagtaagacaagtactccccccaaaatcagtaaagtatctagaagatttgaataaatattaacagattggattcactgaccttgttacaagaaagaattatacatgatgataggagagaggaagccacagcacaggcacttactgattaactaaattttgaagctgtgaaatgcaccttatcctttagtgaaagatgatataaatagcttagttgccttcaaactggcagagactttttgaatggatggatgctgattttttaaaaaggagcccatttctgaggcatcttttaaagcaggggtcctcaacccctgggccatagactgatactgtccagtggcctgttaggaaatgggcagaacagtaggaggtgagcagccaagcattactgcctgagctccacctcctgtcagattagtggcagcattagattctcataggagcagaaaccctattgtgaactgtgcatatgagggatctaggttgcatgctccctatgagaatctaatgactgatgatctgagtggaacagttccatctcaaaaccatttccctgcaccctccattcacggaaaaattgtcttccacaaaaccagtcccaggtgctaaaaagggactactgttgtaaaggaataagtccctttgctattattatttttattaagatggaatcttgctctgtcacccaggctggagtgcagtggcacagtcttggctcactgcaacatctgcctcctgggttcaagcaattctcctgcctcagcctcccaagtagctgtgcacaggcatgtgtacaggcaagtgcaatcatgctctgctaactttttgtattttgggagaggcagtgtttcaccatgttggccagcctggtctcaaactcctgacctcaagtgatccacccaccttggcctctgaaagtgctgaaattacaggcatgagccaccactcctgcaccccttggctattattgaagtgttctttttcttttttgatcacatctatgaagtatattggagagaaagagaaggtagaatgggaatttcaacagggtcacggtggctcactcctgtaatcccaacactttgggaggccaaagtgggtagatgacctgaggtcaggagtcgagaccagcctggccaacatggtaaaaccccatctctactaaaaatacgaaaattagccaggtgtggtggtgggcacctgtaatcccagctactcaggaagctgaggtaaggacaattgcttgaacccaagaggcggaggttgcagtgagccaagatagcgccactgcactccagcctgggtgatggagccagtctccgtctcaaaaaagaaaaaaaaaagtatggtaatttctccattaactttgatgcttctatggtcttgatctccaggtcaatgcaatgccccagaatggcttccatttgccaggcctaccaacctaactgatgagtttgagtttcccattgggacatatctgaactatgaatgccgccctggttattccggaagaccgttttctatcatctgcctaaaaaactcagtctggactggtgctaaggacaggtgcagacgtaagtaactctggagtgggaacccccctgttagtcaaacatctgtaagatctgattcaatttgttcaaattttgtaactgagttgcatatgacaattagtttgccaaggtgcaatacatatgagaattattcttgtagatcataccttgttactgctttgagttcctggcgccttcattaaaagtttatttcatgagaaacagtcattgcaggacatgattgagggaaaacccccattcactgggggtctcccattttcatgactaaaattaagtaatgaatgacttgggacaagaaagagaagtggattaaataactaaaagatgtgacaatcttgggctttgagatctttggattatatcagttgaattgaattacagataataacgaagtttacatttttctgggaggcataatatggggatgaaacagatctgaaaggaaagttttttttgaaagggagctgatcctgaggcagtctggtgagtttcctcaaggtagcaaaatctgtggaaccatcagaactgcgtgtgttcctcagtaagctacaggcaggttgagaccttatgtactaaaaaaagtttttagtttactctacttggctccaaaattctgtttctttcctgtaggtaaatcatgtcgtaatcctccagatcctgtgaatggcatggtgcatgtgatcaaaggcatccagttcggatcccaaattaaatattcttgtactaaagggtgagttggcatctcttgaaccaacatctcttggttcaagagttctaacacagccttactaccttctagtcacatgtcagaaaggacaactaaactattaccatctgctctttaacggcttcaacacagatgtttagctcctgactgaaatgagcaaaggtatgacaagatcgggggaaaatcatctgtatccttgctggaaaccaaggcagagcatatatgaaaagtgtggcattcattgggtgggaaggaagaaaatgggggaagagtatagtcaaagcacacaaacagccttaacgcagaggggacattgctggaagaaagggaaggccattgagtaactgtgtgagagaaatcttaacggtcatagcacaagtagtttgctagggctgctgtaacagagtactccaaaacgggtggcttaacacaaatgaagtttttaaaattctgttccggaggctgaaagtgcaaaatcaaggtgttggcagagccatgctcccctctaaaacctgtaaggatggatccttctttgcttcttccagcttctggagccccaggccttccttggcgtgtggcagcagaactcccgtttctgtctctgtcctcacatggccgtcttccctctgggtctgtgtcctcacatgctgttttcctgtctgtgtatggctgtgtcgaaagtgctctcttttaataaggacaccaatcataatggattagcgcccacactaacgacctcatcttaactggattgcctctccaaagaccatatttccaaataagatcacattaataagcactggggattaagacatcaatatatttcggggtaagggggacacaattctcattcattgctggtaggaatgcaaaatggtaccatgacttggaaagataatttggcagttttttataaaactaaacatactcttaccatgttatccagcagttatccttcttggcatttatccaaaggaattgaaaactcatgttcacaccaaaaaaaaaagaaatctgcacacagatgtttataacagctttattcataattgccaaaacttggaagcaatcaagatgtcctttagcaagggaatggataaactgtggtacatccatacaatagaatattattcaataccaaaaagaaatgagctatcaagccatgaagagacatagaggaaccttaaatagtgaaccttttttcaccatcactaagtgaaagaagccaatctgaaaaggctacataacatatgattccaactatatgccattctggaaaaggcaaaactatggagacagtgaaaatatcagtggttgtcaggggttagggaagaaggggatgaatcggaagagcacagaggattttgagggtagtgaaactactctgtatgatgccataacagtaggtacatgtcataataaatttatccgaagtcatatagtgtacaataccaagagtggaccctaacataaactatggacttggggtggccatgatgtgtcagtgtaggttcctcaattgcgaaaaacgtaccaccctggtgaaagatgtttataataggggaggttatccatgtataggggcagggagtacataggaaatctctgtatcttctgttcattattgctgtgaaccaaaaactgtgctaaaacacaaagtctattttttaaaactgcatagacataaatacatgggcatatgtgcataaacagacacgcacacaaataagtgcaggtaaaacaggaaatttgaacaaaatctgtggattataactgtttcaatatcttaatgttgatgttgcactattgttttgcaaaatgttattattaggggaaaattgagtaaatagtacctgggatctctctgtactattccctgcatgtgaatctgattatctcaaagtaaaaagttttttttttttttaaagttcctactaaatttccaaggggatgggcttcccctcagatcactaccccttttcagggagcaataaagtaatcttccttggaatgtagcaatctgtaaccaatcaaaatgctgtaactatgcatggtcccatatggaaaatataatcctgctaaaatttctctgtctctgcctatgtaagtgataccttatgtcctccactttggagtgctgaccccattcatttggagttggtctcttccaggtggctacccttaacctttgtgctcaaataaactctatccttaaatatattttctgaatctcattatttaaggttgaaaatgtgctaacctaaataattcacaggatttgttttttattctcattttttcctaacctatccacctggttcaaggcacatagattaagaaggaaaatggaaatgggactaatatcccaggcttcactgtccctcttcgggccctggggaggagactcccaaaagtctagacatgttcacccacatcctgtatgtggtttctggaaacgaaatgatcatggcttttcctgaaccatggcttaactttgtgaatccacaactctctcttccccaggagatccaaaaaggtagggtaggatgtaaaggcttcaatctgttcaagtggatatgagactccctggctccccttacaataagtagcatggattttgtctctctgccttacttcctccaaacattctgaatgagaagtgttcaaaccactatttgttcaattgcttaatctactttgggacacaagtttaataaattaaaatattcttctatctgttccccttgatcagtgaacataaagttatcttttgactcatatttaaaatgttcagtattacaacactgaacaatagtatggaggaaaaaaaatgccaacttaagtttgaacttgcttcaccattcctatcccaacccccatgattagaaaatcaaaaagaacactttgagaaataacctcagtggggtcaaaagccagaggagcctccaggatcccttgttcctaagacaaacaggcaggaggaggtgcacatataggattgcagctgttcttcacttcatttgttcacatacttcatacttgtgtttatgtctgttggcagtgcaatagaaaatgatttcatttttggtggtatactagaaggcattaaaaaacaaaataaggccgggtgtgctggctgtaatcccagcactttgggaggctgaggtgggtggattacctgaagtcaggaattcaagaccagcctggtcaatgtggtgaagcctgtttctactaaaaatgcaaaaatcagccgagtgtggtggcaggcacctgtagtcccagcagctaaggaggctgaggcaggagaatctcttgaatccgggaggtggaggttgcagtgagccaagatcgcaccattgcactccagccttggcgacaagagtgaaaatctgtctcaaaaaaaaagaacaacaacaacagcaacaacaaaaatcccaaatgatattgaagtcattaataattacatcataatcactagtataatgtaatagtgcatcaagtatcttcaaaagcacccactgttctctcactatttatttgatcttcatttgtcactgttttgttgtttgaataaagctttatgttgccaggttttcttacatactcataaagcaaagttctcagctataccaataaccatgactgttatttgacattgcttcattccttcatgtatagtactatcaagtttgaccctaccctcactatgactagtttcacccaaccatctatcacaacagagagtctaacgtgaagtaaaataaatgtcataaattattccaaatttatggcacactgtgaacagtttgagacatactaattgagaattgctgactttagtattttaagtataaaatgagtgttcaattctttttgatcagcctggatttcctttggttctagttatgtatccccttccttccttccttccttccttccttccttccttccttccttccttccttccttccttcctccctcccttccttcctttccttctttccttctttgctttctttctttcctttttactttctttttttttttttgatacaaggtcttgctttgttgcccaggctggagtgcagtggcatgatcagcactcactgcagcctcaacctccctgactcaagcgatcttcatgcctcagcctcctgagtagctaggactacaggaatgtgccaccacgcctggcttttttataaattttttgtacagacagcgtctcactatattgcccaggctggtctcgaactcctgagctcaagcaatcctcttgcctcagccccccaaagtgctggaattacaggggtgagccactgtgaagggcctaatttggccttctttaatgaatcttattgataaaagcccatccatgcatccgtgcatccatacttttaaggcaaagaaatacatacaacaggactgtatacacacatatacatgtatatatatgacagcttccctgcactcaagaactttgtgctatcttttaaaaaatgaaatttataggaaaaactacaattcatcttagatttgcataaaaaagtgtcataaggtaataaagaagagaaagctcatccaattgagaatgtatgaaaaagaaagtcaaaaagtcccaagaagaatgtgaaacttgggaaagtgatagatagtcctttgatgagtgtaaaaagtccctctgaatcctataagagtgtaatctctggaagtagtaatttaattgggtagttgacctgtgtctttagaatgtaacattccttattttttgcctctagataccgactcattggttcctcgtctgccacatgcatcatctcaggtgatactgtcatttgggataatgaaacacctatttgtgacagtgagttgaaatatcccttcctatttcttttaccgacacattctaatttttctctggaataataaaaatcttaactgaattccttctgtgcaatctgtccttcacacggctgaagactgcggtaatgttctcgaatattcctatggggttcctggcaactctttctttaagttcttccttatcctgggatgtgtcttttctaattccagaagtttaaatacataaaagccttcaaacttgattttacttcaataaacgtgaaattatgttgtttctaccacctccagtataataatcatcttgcttggcaaatcagtaaagatttttaaaattgatactcttcaaggttagcgaagctgtggaagaacctggactctcatgtaccacgagatcaacacatcctcttgaaaggccccatgcactataaacctcagaagtgaacatatattttaacctacttcttaaaatttatacttaggaaataatcacacactttttaaagtagtttggtataaactattcattgcagcattatttatattagttaaaatgttagagtaacctaaatattttaaactatggtttggaaataatctactagtaggaaaaagatgtgttcaaatgaccattataaagaattccctaagaaacataaaacagctatgcagaatgaaaataagtatatccatacactggcatggtattcagccataaaaaatgacagcataaagaagcacttaatgactagaaagagatgtattttacgtggaaaaagaatcagatgaacggcatatatggcaagatctcactttattaaaaaataatacacctatgtagtgagggccaggctgaggctgagagaaatacagtgtataacatctttgtcttactcttctctttggataactggactcctttacttttcttcttggtatttaaaaatgttacttttactagaaagtttacgagcttcagaatctaagtttacaaatgacattggtcacacatttattgctgtttatccactttaagaaacagttttgctattttgtaaaacaaattgggaaaccttccatcttatttgaaatctgtaataaacatggaattggaataggaattttcctggaaatatgaaaaagattagtaaaatagagaaaacaaaaaatataataatacacctatacnnnnnnnnnnnnnnnnnnnnnnnnnnnnnnnnnnnnnnnnnnnnnnnnnnnnnnnnnnnnnnnnnnnnnnnnnnnnnnnnnnnnnnnnnnnnnnnnnnnnnnnnnnnnnnnnnnnnnnnnnnnnnnnnnnnnnnnnnnnnnnnnnnnnnnnnnnnnnnnnnnnnnnnnnnnnnnnnnnnnnnnnnnnnnnnnnntccctccctccctccctccctcccttccttccttccttccttccttccttccttccttccttccttccttccctctttccttattttctttcttctttaccacgctggctaggaccaccagtataacattgaacattggtagcaatagatgtcatccttgtcttgttccacatctcaaagttaaagtttaaaacatttcaccattaagctggtgtttactgtaggcttttggtagataaccatttttgaaataaggaaattatcttatatattcttcattgctaaaaaatttatgtctttgaatcatgttgaagtttatcaaacactttagttacatatattgatgtaatcatatctgtttctctttttctgttaatgcaacaaattgttttgagtacatttttgaaaggcaaatgattttaaatttcaattttacattcttaaaataaatcaactcagtcataatatttaatcatttttatatatggcaaatatgcttttatgatatattttagatgtttctattaaaatataattcatgtatcataaaagttacctttttaaattatacaatttagtggtgtttagtatattcacaaagttgtgtgttatggtctgaacgtttgagtccaccccaaatccatatgttgaaatccttacccctaaagtgatgacattaggaagtgaggcctttgaaagatgattagggcatgagagcagagccatcacgaatgggattagcgtcctaataaaagaggcccggaagagctcctttggccctcccaccatgggaggagatgctgaatctgccagtgttggtcttgaactccccagcctccaaaactacaagaaataaatttctgttgtgtacaagctaaccagtttatagtattttgttatagcagcccaaatagactaagacattgggcaaccagcaccgccaattaattctagaacactttcatcatcccattcctaacatattttagagataagactataattttctttcttgtaatgtccttaataagattttgatatcaaagctatgacagtcttataaagccagctggtagtgtttcatatatttgtttccttgtaagggtttatataagattggcattatttcttctttaaaaataattcaccagaaaaggtatgtggcctggagtttacgttcttgggaagtttttttttttccaaccattttcctgtaccatgtagacttttggctgaagtataacatatatatatatatacacacacacacacacacacacacacacacacatatatacatatatacttatatgtatatatgtatatatacgtatatacgtatgcatacgtgtatgtatatgtgtatatatgtacgtatatatacatacgtacgtatatatacgtgtatacgtatatatacatatacatatataggtatatacttatatatacgtatatatacatatacatatataggtatatacgtatacgtatacatatataggtatatgtatacatatatacacactatatatatatacacatatatatagtgtgtatatatgcacacatcttaatcatgcagttcaatggagttttacaaagtaaatgtatccatgtaaacgtcactcagattaagatatagaacattatcagcaccccagaagccttcccgatgccctttcccagttatcttcccaaagaaaccactattctgatttataacactaatagttttgttgcttcctaaattttatattaaaggaatcaaaaaatagatactcttttgtgtccagcttcatctcaatgttatatttggaagagtcatttttgtttttgcaggaaggattgttgggtcttctttattattatgttgtatttcattgatgatcttgagtaccttttcacgtttgtgaagtgctattccaaacttttgcctattatttattagtttgtctattgttttgtagaagttctttaaatattctcatgttttctaataaatgtaacacaaatattgtctttcaggctgtggcttttcttttttccttcttaatgatgtcttttgtttatgaaagttctacattttaataatattcaatttatgagtcttcttttttccagttactgctttttctattctacttaagcaattgggccaagtgaggtggctcatgtctataatcccagcattttggaaggccaaggcaggaggattgcttgaagccaggagttcaagaccagcctgggcagcagagtgagaccctgtctctacaaaaaaaataaatatataaaattagctgggctcagtggcacatgcctgtagtcccagctacttgggaggctgaggtgggaggatcccttgagcacagaggttcaaggcttcagtgagttatgatggtgccactgcactccagcctaggtgacaaagccctgtttcttatggatgggcaatagatctaatatcatctattaaaaagactattccttgcatagtgcaatgcgacaccaccatgaccataagtcaggtgaccttatgagtggatctcattccagagaggttctgtttcactggtttatttgccatactataagcactacattaagattttaattactatagcattacattaagatttgatatctggtagcatatatctcctaactatgtgcatcttcaagatttacttggtgattcttggccctttgcattaccatataaaatttagaatcagcttgtcaatttccacataaagaatcctacttgaatttgtattaagtttctgttgactcagtagatcaatttgtggacaagtaacaaatttacagttttgaagtttaaatttatgaatatgatatatcctcccattttgaagtcttctttaatttcttttaataatatttgttaatgtacattatagaagtcatgtacctatttcattatctttattctgacatattatttttaaaatttcattctttaattatttacttcttagatatgcacctgtttcatctcagctccagcaaatttgttaaatttacttataaattgaatagtttatctgtagattcttttgaatttgctgtgtaattatgtcatctatgaatctgacaaagtttttacatcttttcctttcttatgtcttttgtttatttctcttgctttattgcattggctagaacctccagtacaatattgaatagaagacatgatacaaggcttttaatagtcctcataaatcatgatgtatgctgtagatttttgcatgatatcctttattagattaaggaaactcccctttctttctaattactaaaagatttatgaatgttctttctaattgatcactgcatgtattgagattatcatgtttctttttcactctgttaatgtaatatattacattgattgatgtttaaaagacaaacgctgaattcctagaataaacctatgttgcttgtgatgtgttatagatgattatcctatgtatgggggatatgcgtgtgtgtgtgtgcaggattgctcatatttttattgtaacattgtaacattgatttaatatttaaaatcagtcaaggtaaacctcactttgatcattgtatcatcctttggaaatattgctggattcagtttcataatattttgttcagaaaatttgcatttatattctcaagagatcttgggttataatttgcttttattttaatgtccttatcaggtttgggcatcaagattatgttggcctcataaaatgtgttaaaaattatttattttttctagtgtctggaacaatttgtgtaacattatttttccttatatgtttggaagaattcagcagtgaagcaatctggacctgagggtttgttgttgttgttgtcaggatttaatatctttaatagctgtaaaactattattttatatcttattgaattagtttgggtaagttatatttttcaaggaatttactcattttatttagatttcctaggttatcagcataatgctgtttattatagtctcatattagcctttggatgcctgtaagttctgtagtgatacccttacactcattaatttctgatattggtaatttcttttgcttctttttccttgattagttttaccggggctttatcaattttactaagcttttcagaaaaacaacttttaactttcttgttttttctttagtttatgactattttctcttttattgatttctgctttaagctttgtgtattcctccagtcctaaattcttgatactaattaatttgtttccaacctttatttttctaatatgtacatttaacctatcaatttttctctaaaactgttttatttatttccaacaatctttatatttttattatcattgtacataaaagctttctaatttcacttttaatatctcctctgacccataggctgtttagaagggcattgcttaatttctaaatatttagagatcttctagttatcattctttcattaatttaatcatttgagacatggtttattgcccagaatatggacgattttggtaaaatgttacatatgcacttgaatgtacagttattttgcttcattttctagaaatgtcatttaggaaaatgtggtttagaacagtctttttttccccctccacttgttctctcagttatggagaagcnnnnnnnnnnnnnnnnnnnnnnnnnnnnnnnnnnnnnnnnnnnnnnnnnnnnnnnnnnnnnnnnnnnnnnnnnnnnnnnnnnnnnnnnnnnnnnnnnnnnnnnnnnnnnnnnnnnnnnnnnnnnnnnnnnnnnnnnnnnnnnnnnnnnnnnnnnnnnnnnnnnnnnnnnnnnnnnnnnnnnnnnnnnnnnnnnnnnnnnnnnnnnnnnnnnnnnnnnnnnnnnnnnnnnnnnnnnnnnnnnnnnnnnnnnnnnnnnnnnnnnnnnnnnnnnnnnnnnnnnnnnnnnnnnnnnnnnnnnnnnnnnnnnnnnnnnnnnnnnnnnnnnnnnnnnnnnnnnnnnnnnnnnnnnnnnnnnnnnnnnnnnnnnnnnnnnnnnnnnnnnnnnnnnnnnnnnnnnnnnnnnnnnnnnnnnnnnnnnnnnnnnnnnnnnnnnnnnnnnnnnnnnnnnnnnnnnnnnnnnnnnnnnnnnnnnnnnnnnnnnnnnnnnnnnnnnnnnnnnnnnnnnnnnnnnnnnnnnnnnnnnnnnnnnnnnnnnnnnnnnnnnnnnnnnnnnnnnnnnnnnnnnnnnnnnnnnnnnnnnnnnnnnnnnnnnnnnnnnnnnnnnnnnnnnnnnnnnnnnnnnnnnnnnnnnnnnnnnnnnnnnnnnnnnnnnnnnnnnnnnnnnnnnnnnnnnnnnnnnnnnnnnnnnnnnnnnnnnnnnnnnnnnnnnnnnnnnnnnnnnnnnnnnnnnnnnnnnnnnnnnnnnnnnnnnnnnnnnnnnnnnnnnnnnnnnnnnnnnnnnnnnnnnnnnnnnnnnnnnnnnnnnnnnnnnnnnnnnnnnnnnnnnnnnnnnnnnnnnnnnnnnnnnnnnnnnnnnnnnnnnnnnnnnnnnnnnnnnnnnnnnnnnnnnnnnnnnnnnnnnnnnnnnnnnnnnnnnnnnnnnnnnnnnnnnnnnnnnnnnnnnnnnnnnnnnnnnnnnnnnnnnnnnnnnnnnnnnnnnnnnnnnnnnnnnnnnnnnnnnnnnnnnnnnnnnnnnnnnnnnnnnnnnnnnnnnnnnnnnnnnnnnnnnnnnnnnnnnnnnnnnnnnnnnnnnnnnnnnnnnnnnnnnnnnnnnnnnnnnnnnnnnnnnnnnnnnnnnnnnnnnnnnnnnnnnnnnnnnnnnnnnnnnnnnnnnnnnnnnnnnnnnnnnnnnnnnnnnnnnnnnnnnnnnnnnnnnnnnnnnnnnnnnnnnnnnnnnnnnnnnnnnnnnnnnnnnnnnnnnnnnnnnnnnnnnnnnnnnnnnnnnnnnnnnnnnnnnnnnnnnnnnnnnnnnnnnnnnnnnnnnnnnnnnnnnnnnnnnnnnnnnnnnnnnnnnnnnnnnnnnnnnnnnnnnnnnnnnnnnnnnnnnnnnnnnnnnnnnnnnnnnnnnnnnnnnnnnnnnnnnnnnnnnnnnnnnnnnnnnnnnnnnnnnnnnnnnnnnnnnnnnnnnnnnnnnnnnnnnnnnnnnnnnnnnnnnnnnnnnnnnnnnnnnnnnnnnnnnnnnnnnnnnnnnnnnnnnnnnnnnnnnnnnnnnnnnnnnnnnnnnnnnnnnnnnnnnnnnnnnnnnnnnnnnnnnnnnnnnnnnnnnnnnnnnnnnnnnnnnnnnnnnnnnnnnnnnnnnnnnnnnnnnnnnnnnnnnnnnnnnnnnnnnnnnnnnnnnnnnnnnnnnnnnnnnnnnnnnnnnnnnnnnnnnnnnnnnnnnnnnnnnnnnnnnnnnnnnnnnnnnnnnnnnnnnnnnnnnnnnnnnnnnnnnnnnnnnnnnnnnnnnnnnnnnnnnnnnnnnnnnnnnnnnnnnnnnnnnnnnnnnnnnnnnnnnnnnnnnnnnnnnnnnnnnnnnnnnnnnnnnnnnnnnnnnnnnnnnnnnnnnnnnnnnnnnnnnnnnnnnnnnnnnnnnnnnnnnnnnnnnnnnnnnnnnnnnnnnnnnnnnnnnnnnnnnnnnnnnnnnnnnnnnnnnnnnnnnnnnnnnnnnnnnnnnnnnnnnnnnnnnnnnnnnnnnnnnnnnnnnnnnnnnnnnnnnnnnnnnnnnnnnnnnnnnnnnnnnnnnnnnnnnnnnnnnnnnnnnnnnnnnnnnnnnnnnnnnnnnnnnnnnnnnnnnnnnnnnnnnnnnnnnnnnnnnnnnnnnnnnnnnnnnnnnnnnnnnnnnnnnnnnnnnnnnnnnnnnnnnnnnnnnnnnnnnnnnnnnnnnnnnnnnnnnnnnnnnnnnnnnnnnnnnnnnnnnnnnnnnnnnnnnnnnnnnnnnnnnnnnnnnnnnnnnnnnnnnnnnnnnnnnnnnnnnnnnnnnnnnnnnnnnnnnnnnnnnnnnnnnnnnnnnnnnnnnnnnnnnnnnnnnnnnnnnnnnnnnnnnnnnnnnnnnnnnnnnnnnnnnnnnnnnnnnnnnnnnnnnnnnnnnnnnnnnnnnnnnnnnnnnnnnnnnnnnnnnnnnnnnnnnnnnnnnnnnnnnnnnnnnnnnnnnnnnnnnnnnnnnnnnnnnnnnnnnnnnnnnnnnnnnnnnnnnnnnnnnnnnnnnnnnnnnnnnnnnnnnnnnnnnnnnnnnnnnnnnnnnnnnnnnnnnnnnnnnnnnnnnnnnnnnnnnnnnnnnnnnnnnnnnnnnnnnnnnnnnnnnnnnnnnnnnnnnnnnnnnnnnnnnnnnnnnnnnnnnnnnnnnnnnnnnnnnnnnnnnnnnnnnnnnnnnnnnnnnnnnnnnnnnnnnnnnnnnnnnnnnnnnnnnnnnnnnnnnnnnnnnnnnnnnnnnnnnnnnnnnnnnnnnnnnnnnnnnnnnnnnnnnnnnnnnnnnnnnnnnnnnnnnnnnnnnnnnnnnnnnnnnnnnnnnnnnnnnnnnnnnnnnnnnnnnnnnnnnnnnnnnnnnnnnnnnnnnnnnnnnnnnnnnnnnnnnnnnnnnnnnnnnnnnnnnnnnnnnnnnnnnnnnnnnnnnnnnnnnnnnnnnnnnnnnnnnnnnnnnnnnnnnnnnnnnnnnnnnnnnnnnnnnnnnnnnnnnnnnnnnnnnnnnnnnnnnnnnnnnnnnnnnnnnnnnnnnnnnnnnnnnnnnnnnnnnnnnnnnnnnnnnnnnnnnnnnnnnnnnnnnnnnnnnnnnnnnnnnnnnnnnnnnnnnnnnnnnnnnnnnnnnnnnnnnnnnnnnnnnnnnnnnnnnnnnnnnnnnnnnnnnnnnnnnnnnnnnnnnnnnnnnnnnnnnnnnnnnnnnnnnnnnnnnnnnnnnnnnnnnnnnnnnnnnnnnnnnnnnnnnnnnnnnnnnnnnnnnnnnnnnnnnnnnnnnnnnnnnnnnnnnnnnnnnnnnnnnnnnnnnnnnnnnnnnnnnnnnnnnnnnnnnnnnnnnnnnnnnnnnnnnnnnnnnnnnnnnnnnnnnnnnnnnnnnnnnnnnnnnnnnnnnnnnnnnnnnnnnnnnnnnnnnnnnnnnnnnnnnnnnnnnnnnnnnnnnnnnnnnnnnnnnnnnnnnnnnnnnnnnnnnnnnnnnnnnnnnnnnnnnnnnnnnnnnnnnnnnnnnnnnnnnnnnnnnnnnnnnnnnnnnnnnnnnnnnnnnnnnnnnnnnnnnnnnnnnnnnnnnnnnnnnnnnnnnnnnnnnnnnnnnnnnnnnnnnnnnnnnnnnnnnnnnnnnnnnnnnnnnnnnnnnnnnnnnnnnnnnnnnnnnnnnnnnnnnnnnnnnnnnnnnnnnnnnnnnnnnnnnnnnnnnnnnnnnnnnnnnnnnnnnnnnnnnnnnnnnnnnnnnnnnnnnnnnnnnnnnnnnnnnnnnnnnnnnnnnnnnnnnnnnnnnnnnnnnnnnnnnnnnnnnnnnnnnnnnnnnnnnnnnnnnnnnnnnnnnnnnnnnnnnnnnnnnnnnnnnnnnnnnnnnnnnnnnnnnnnnnnnnnnnnnnnnnnnnnnnnnnnnnnnnnnnnnnnnnnnnnnnnnnnnnnnnnnnnnnnnnnnnnnnnnnnnnnnnnnnnnnnnnnnnnnnnnnnnnnnnnnnnnnnnnnnnnnnnnnnnnnnnnnnnnnnnnnnnnnnnnnnnnnnnnnnnnnnnnnnnnnnnnnnnnnnnnnnnnnnnnnnnnnnnnnnnnnnnnnnnnnnnnnnnnnnnnnnnnnnnnnnnnnnnnnnnnnnnnnnnnnnnnnnnnnnnnnnnnnnnnnnnnnnnnnnnnnnnnnnnnnnnnnnnnnnnnnnnnnnnnnnnnnnnnnnnnnnnnnnnnnnnnnnnnnnnnnnnnnnnnnnnnnnnnnnnnnnnnnnnnnnnnnnnnnnnnnnnnnnnnnnnnnnnnnnnnnnnnnnnnnnnnnnnnnnnnnnnnnnnnnnnnnnnnnnnnnnnnnnnnnnnnnnnnnnnnnnnnnnnnnnnnnnnnnnnnnnnnnnnnnnnnnnnnnnnnnnnnnnnnnnnnnnnnnnnnnnnnnnnnnnnnnnnnnnnnnnnnnnnnnnnnnnnnnnnnnnnnnnnnnnnnnnnnnnnnnnnnnnnnnnnnnnnnnnnnnnnnnnnnnnnnnnnnnnnnnnnnnnnnnnnnnnnnnnnnnnnnnnnnnnnnnnnnnnnnnnnnnnnnnnnnnnnnnnnnnnnnnnnnnnnnnnnnnnnnnnnnnnnnnnnnnnnnnnnnnnnnnnnnnnnnnnnnnnnnnnnnnnnnnnnnnnnnnnnnnnnnnnnnnnnnnnnnnnnnnnnnnnnnnnnnnnnnnnnnnnnnnnnnnnnnnnnnnnnnnnnnnnnnnnnnnnnnnnnnnnnnnnnnnnnnnnnnnnnnnnnnnnnnnnnnnnnnnnnnnnnnnnnnnnnnnnnnnnnnnnnnnnnnnnnnnnnnnnnnnnnnnnnnnnnnnnnnnnnnnnnnnnnnnnnnnnnnnnnnnnnnnnnnnnnnnnnnnnnnnnnnnnnnnnnnnnnnnnnnnnnnnnnnnnnnnnnnnnnnnnnnnnnnnnnnnnnnnnnnnnnnnnnnnnnnnnnnnnnnnnnnnnnnnnnnnnnnnnnnnnnnnnnnnnnnnnnnnnnnnnnnnnnnnnnnnnnnnnnnnnnnnnnnnnnnnnnnnnnnnnnnnnnnnnnnnnnnnnnnnnnnnnnnnnnnnnnnnnnnnnnnnnnnnnnnnnnnnnnnnnnnnnnnnnnnnnnnnnnnnnnnnnnnnnnnnnnnnnnnnnnnnnnnnnnnnnnnnnnnnnnnnnnnnnnnnnnnnnnnnnnnnnnnnnnnnnnnnnnnnnnnnnnnnnnnnnnnnnnnnnnnnnnnnnnnnnnnnnnnnnnnnnnnnnnnnnnnnnnnnnnnnnnnnnnnnnnnnnnnnnnnnnnnnnnnnnnnnnnnnnnnnnnnnnnnnnnnnnnnnnnnnnnnnnnnnnnnnnnnnnnnnnnnnnnnnnnnnnnnnnnnnnnnnnnnnnnnnnnnnnnnnnnnnnnnnnnnnnnnnnnnnnnnnnnnnnnnnnnnnnnnnnnnnnnnnnnnnnnnnnnnnnnnnnnnnnnnnnnnnnnnnnnnnnnnnnnnnnnnnnnnnnnnnnnnnnnnnnnnnnnnnnnnnnnnnnnnnnnnnnnnnnnnnnnnnnnnnnnnnnnnnnnnnnnnnnnnnnnnnnnnnnnnnnnnnnnnnnnnnnnnnnnnnnnnnnnnnnnnnnnnnnnnnnnnnnnnnnnnnnnnnnnnnnnnnnnnnnnnnnnnnnnnnnnnnnnnnnnnnnnnnnnnnnnnnnnnnnnnnnnnnnnnnnnnnnnnnnnnnnnnnnnnnnnnnnnnnnnnnnnnnnnnnnnnnnnnnnnnnnnnnnnnnnnnnnnnnnnnnnnnnnnnnnnnnnnnnnnnnnnnnnnnnnnnnnnnnnnnnnnnnnnnnnnnnnnnnnnnnnnnnnnnnnnnnnnnnnnnnnnnnnnnnnnnnnnnnnnnnnnnnnnnnnnnnnnnnnnnnnnnnnnnnnnnnnnnnnnnnnnnnnnnnnnnnnnnnnnnnnnnnnnnnnnnnnnnnnnnnnnnnnnnnnnnnnnnnnnnnnnnnnnnnnnnnnnnnnnnnnnnnnnnnnnnnnnnnnnnnnnnnnnnnnnnnnnnnnnnnnnnnnnnnnnnnnnnnnnnnnnnnnnnnnnnnnnnnnnnnnnnnnnnnnnnnnnnnnnnnnnnnnnnnnnnnnnnnnnnnnnnnnnnnnnnnnnnnnnnnnnnnnnnnnnnnnnnnnnnnnnnnnnnnnnnnnnnnnnnnnnnnnnnnnnnnnnnnnnnnnnnnnnnnnnnnnnnnnnnnnnnnnnnnnnnnnnnnnnnnnnnnnnnnnnnnnnnnnnnnnnnnnnnnnnnnnnnnnnnnnnnnnnnnnnnnnnnnnnnnnnnnnnnnnnnnnnnnnnnnnnnnnnnnnnnnnnnnnnnnnnnnnnnnnnnnnnnnnnnnnnnnnnnnnnnnnnnnnnnnnnnnnnnnnnnnnnnnnnnnnnnnnnnnnnnnnnnnnnnnnnnnnnnnnnnnnnnnnnnnnnnnnnnnnnnnnnnnnnnnnnnnnnnnnnnnnnnnnnnnnnnnnnnnnnnnnnnnnnnnnnnnnnnnnnnnnnnnnnnnnnnnnnnnnnnnnnnnnnnnnnnnnnnnnnnnnnnnnnnnnnnnnnnnnnnnnnnnnnnnnnnnnnnnnnnnnnnnnnnnnnnnnnnnnnnnnnnnnnnnnnnnnnnnnnnnnnnnnnnnnnnnnnnnnnnnnnnnnnnnnnnnnnnnnnnnnnnnnnnnnnnnnnnnnnnnnnnnnnnnnnnnnnnnnnnnnnnnnnnnnnnnnnnnnnnnnnnnnnnnnnnnnnnnnnnnnnnnnnnnnnnnnnnnnnnnnnnnnnnnnnnnnnnnnnnnnnnnnnnnnnnnnnnnnnnnnnnnnnnnnnnnnnnnnnnnnnnnnnnnnnnnnnnnnnnnnnnnnnnnnnnnnnnnnnnnnnnnnnnnnnnnnnnnnnnnnnnnnnnnnnnnnnnnnnnnnnnnnnnnnnnnnnnnnnnnnnnnnnnnnnnnnnnnnnnnnnnnnnnnnnnnnnnnnnnnnnnnnnnnnnnnnnnnnnnnnnnnnnnnnnnnnnnnnnnnnnnnnnnnnnnnnnnnnnnnnnnnnnnnnnnnnnnnnnnnnnnnnnnnnnnnnnnnnnnnnnnnnnnnnnnnnnnnnnnnnnnnnnnnnnnnnnnnnnnnnnnnnnnnnnnnnnnnnnnnnnnnnnnnnnnnnnnnnnnnnnnnnnnnnnnnnnnnnnnnnnnnnnnnnnnnnnnnnnnnnnnnnnnnnnnnnnnnnnnnnnnnnnnnnnnnnnnnnnnnnnnnnnnnnnnnnnnnnnnnnnnnnnnnnnnnnnnnnnnnnnnnnnnnnnnnnnnnnnnnnnnnnnnnnnnnnnnnnnnnnnnnnnnnnnnnnnnnnnnnnnnnnnnnnnnnnnnnnnnnnnnnnnnnnnnnnnnnnnnnnnnnnnnnnnnnnnnnnnnnnnnnnnnnnnnnnnnnnnnnnnnnnnnnnnnnnnnnnnnnnnnnnnnnnnnnnnnnnnnnnnnnnnnnnnnnnnnnnnnnnnnnnnnnnnnnnnnnnnnnnnnnnnnnnnnnnnnnnnnnnnnnnnnnnnnnnnnnnnnnnnnnnnnnnnnnnnnnnnnnnnnnnnnnnnnnnnnnnnnnnnnnnnnnnnnnnnnnnnnnnnnnnnnnnnnnnnnnnnnnnnnnnnnnnnnnnnnnnnnnnnnnnnnnnnnnnnnnnnnnnnnnnnnnnnnnnnnnnnnnnnnnnnnnnnnnnnnnnnnnnnnnnnnnnnnnnnnnnnnnnnnnnnnnnnnnnnnnnnnnnnnnnnnnnnnnnnnnnnnnnnnnnnnnnnnnnnnnnnnnnnnnnnnnnnnnnnnnnnnnnnnnnnnnnnnnnnnnnnnnnnnnnnnnnnnnnnnnnnnnnnnnnnnnnnnnnnnnnnnnnnnnnnnnnnnnnnnnnnnnnnnnnnnnnnnnnnnnnnnnnnnnnnnnnnnnnnnnnnnnnnnnnnnnnnnnnnnnnnnnnnnnnnnnnnnnnnnnnnnnnnnnnnnnnnnnnnnnnnnnnnnnnnnnnnnnnnnnnnnnnnnnnnnnnnnnnnnnnnnnnnnnnnnnnnnnnnnnnnnnnnnnnnnnnnnnnnnnnnnnnnnnnnnnnnnnnnnnnnnnnnnnnnnnnnnnnnnnnnnnnnnnnnnnnnnnnnnnnnnnnnnnnnnnnnnnnnnnnnnnnnnnnnnnnnnnnnnnnnnnnnnnnnnnnnnnnnnnnnnnnnnnnnnnnnnnnnnnnnnnnnnnnnnnnnnnnnnnnnnnnnnnnnnnnnnnnnnnnnnnnnnnnnnnnnnnnnnnnnnnnnnnnnnnnnnnnnnnnnnnnnnnnnnnnnnnnnnnnnnnnnnnnnnnnnnnnnnnnnnnnnnnnnnnnnnnnnnnnnnnnnnnnnnnnnnnnnnnnnnnnnnnnnnnnnnnnnnnnnnnnnnnnnnnnnnnnnnnnnnnnnnnnnnnnnnnnnnnnnnnnnnnnnnnnnnnnnnnnnnnnnnnnnnnnnnnnnnnnnnnnnnnnnnnnnnnnnnnnnnnnnnnnnnnnnnnnnnnnnnnnnnnnnnnnnnnnnnnnnnnnnnnnnnnnnnnnnnnnnnnnnnnnnnnnnnnnnnnnnnnnnnnnnnnnnnnnnnnnnnnnnnnnnnnnnnnnnnnnnnnnnnnnnnnnnnnnnnnnnnnnnnnnnnnnnnnnnnnnnnnnnnnnnnnnnnnnnnnnnnnnnnnnnnnnnnnnnnnnnnnnnnnnnnnnnnnnnnnnnnnnnnnnnnnnnnnnnnnnnnnnnnnnnnnnnnnnnnnnnnnnnnnnnnnnnnnnnnnnnnnnnnnnnnnnnnnnnnnnnnnnnnnnnnnnnnnnnnnnnnnnnnnnnnnnnnnnnnnnnnnnnnnnnnnnnnnnnnnnnnnnnnnnnnnnnnnnnnnnnnnnnnnnnnnnnnnnnnnnnnnnnnnnnnnnnnnnnnnnnnnnnnnnnnnnnnnnnnnnnnnnnnnnnnnnnnnnnnnnnnnnnnnnnnnnnnnnnnnnnnnnnnnnnnnnnnnnnnnnnnnnnnnnnnnnnnnnnnnnnnnnnnnnnnnnnnnnnnnnnnnnnnnnnnnnnnnnnnnnnnnnnnnnnnnnnnnnnnnnnnnnnnnnnnnnnnnnnnnnnnnnnnnnnnnnnnnnnnnnnnnnnnnnnnnnnnnnnnnnnnnnnnnnnnnnnnnnnnnnnnnnnnnnnnnnnnnnnnnnnnnnnnnnnnnnnnnnnnnnnnnnnnnnnnnnnnnnnnnnnnnnnnnnnnnnnnnnnnnnnnnnnnnnnnnnnnnnnnnnnnnnnnnnnnnnnnnnnnnnnnnnnnnnnnnnnnnnnnnnnnnnnnnnnnnnnnnnnnnnnnnnnnnnnnnnnnnnnnnnnnnnnnnnnnnnnnnnnnnnnnnnnnnnnnnnnnnnnnnnnnnnnnnnnnnnnnnnnnnnnnnnnnnnnnnnnnnnnnnnnnnnnnnnnnnnnnnnnnnnnnnnnnnnnnnnnnnnnnnnnnnnnnnnnnnnnnnnnnnnnnnnnnnnnnnnnnnnnnnnnnnnnnnnnnnnnnnnnnnnnnnnnnnnnnnnnnnnnnnnnnnnnnnnnnnnnnnnnnnnnnnnnnnnnnnnnnnnnnnnnnnnnnnnnnnnnnnnnnnnnnnnnnnnnnnnnnnnnnnnnnnnnnnnnnnnnnnnnnnnnnnnnnnnnnnnnnnnnnnnnnnnnnnnnnnnnnnnnnnnnnnnnnnnnnnnnnnnnnnnnnnnnnnnnnnnnnnnnnnnnnnnnnnnnnnnnnnnnnnnnnnnnnnnnnnnnnnnnnnnnnnnnnnnnnnnnnnnnnnnnnnnnnnnnnnnnnnnnnnnnnnnnnnnnnnnnnnnnnnnnnnnnnnnnnnnnnnnnnnnnnnnnnnnnnnnnnnnnnnnnnnnnnnnnnnnnnnnnnnnnnnnnnnnnnnnnnnnnnnnnnnnnnnnnnnnnnnnnnnnnnnnnnnnnnnnnnnnnnnnnnnnnnnnnnnnnnnnnnnnnnnnnnnnnnnnnnnnnnnnnnnnnnnnnnnnnnnnnnnnnnnnnnnnnnnnnnnnnnnnnnnnnnnnnnnnnnnnnnnnnnnnnnnnnnnnnnnnnnnnnnnnnnnnnnnnnnnnnnnnnnnnnnnnnnnnnnnnnnnnnnnnnnnnnnnnnnnnnnnnnnnnnnnnnnnnnnnnnnnnnnnnnnnnnnnnnnnnnnnnnnnnnnnnnnnnnnnnnnnnnnnnnnnnnnnnnnnnnnnnnnnnnnnnnnnnnnnnnnnnnnnnnnnnnnnnnnnnnnnnnnnnnnnnnnnnnnnnnnnnnnnnnnnnnnnnnnnnnnnnnnnnnnnnnnnnnnnnnnnnnnnnnnnnnnnnnnnnnnnnnnnnnnnnnnnnnnnnnnnnnnnnnnnnnnnnnnnnnnnnnnnnnnnnnnnnnnnnnnnnnnnnnnnnnnnnnnnnnnnnnnnnnnnnnnnnnnnnnnnnnnnnnnnnnnnnnnnnnnnnnnnnnnnnnnnnnnnnnnnnnnnnnnnnnnnnnnnnnnnnnnnnnnnnnnnnnnnnnnnnnnnnnnnnnnnnnnnnnnnnnnnnnnnnnnnnnnnnnnnnnnnnnnnnnnnnnnnnnnnnnnnnnnnnnnnnnnnnnnnnnnnnnnnnnnnnnnnnnnnnnnnnnnnnnnnnnnnnnnnnnnnnnnnnnnnnnnnnnnnnnnnnnnnnnnnnnnnnnnnnnnnnnnnnnnnnnnnnnnnnnnnnnnnnnnnnnnnnnnnnnnnnnnnnnnnnnnnnnnnnnnnnnnnnnnnnnnnnnnnnnnnnnnnnnnnnnnnnnnnnnnnnnnnnnnnnnnnnnnnnnnnnnnnnnnnnnnnnnnnnnnnnnnnnnnnnnnnnnnnnnnnnnnnnnnnnnnnnnnnnnnnnnnnnnnnnnnnnnnnnnnnnnnnnnnnnnnnnnnnnnnnnnnnnnnnnnnnnnnnnnnnnnnnnnnnnnnnnnnnnnnnnnnnnnnnnnnnnnnnnnnnnnnnnnnnnnnnnnnnnnnnnnnnnnnnnnnnnnnnnnnnnnnnnnnnnnnnnnnnnnnnnnnnnnnnnnnnnnnnnnnnnnnnnnnnnnnnnnnnnnnnnnnnnnnnnnnnnnnnnnnnnnnnnnnnnnnnnnnnnnnnnnnnnnnnnnnnnnnnnnnnnnnnnnnnnnnnnnnnnnnnnnnnnnnnnnnnnnnnnnnnnnnnnnnnnnnnnnnnnnnnnnnnnnnnnnnnnnnnnnnnnnnnnnnnnnnnnnnnnnnnnnnnnnnnnnnnnnnnnnnnnnnnnnnnnnnnnnnnnnnnnnnnnnnnnnnnnnnnnnnnnnnnnnnnnnnnnnnnnnnnnnnnnnnnnnnnnnnnnnnnnnnnnnnnnnnnnnnnnnnnnnnnnnnnnnnnnnnnnnnnnnnnnnnnnnnnnnnnnnnnnnnnnnnnnnnnnnnnnnnnnnnnnnnnnnnnnnnnnnnnnnnnnnnnnnnnnnnnnnnnnnnnnnnnnnnnnnnnnnnnnnnnnnnnnnnnnnnnnnnnnnnnnnnnnnnnnnnnnnnnnnnnnnnnnnnnnnnnnnnnnnnnnnnnnnnnnnnnnnnnnnnnnnnnnnnnnnnnnnnnnnnnnnnnnnnnnnnnnnnnnnnnnnnnnnnnnnnnnnnnnnnnnnnnnnnnnnnnnnnnnnnnnnnnnnnnnnnnnnnnnnnnnnnnnnnnnnnnnnnnnnnnnnnnnnnnnnnnnnnnnnnnnnnnnnnnnnnnnnnnnnnnnnnnnnnnnnnnnnnnnnnnnnnnnnnnnnnnnnnnnnnnnnnnnnnnnnnnnnnnnnnnnnnnnnnnnnnnnnnnnnnnnnnnnnnnnnnnnnnnnnnnnnnnnnnnnnnnnnnnnnnnnnnnnnnnnnnnnnnnnnnnnnnnnnnnnnnnnnnnnnnnnnnnnnnnnnnnnnnnnnnnnnnnnnnnnnnnnnnnnnnnnnnnnnnnnnnnnnnnnnnnnnnnnnnnnnnnnnnnnnnnnnnnnnnnnnnnnnnnnnnnnnnnnnnnnnnnnnnnnnnnnnnnnnnnnnnnnnnnnnnnnnnnnnnnnnnnnnnnnnnnnnnnnnnnnnnnnnnnnnnnnnnnnnnnnnnnnnnnnnnnnnnnnnnnnnnnnnnnnnnnnnnnnnnnnnnnnnnnnnnnnnnnnnnnnnnnnnnnnnnnnnnnnnnnnnnnnnnnnnnnnnnnnnnnnnnnnnnnnnnnnnnnnnnnnnnnnnnnnnnnnnnnnnnnnnnnnnnnnnnnnnnnnnnnnnnnnnnnnnnnnnnnnnnnnnnnnnnnnnnnnnnnnnnnnnnnnnnnnnnnnnnnnnnnnnnnnnnnnnnnnnnnnnnnnnnnnnnnnnnnnnnnnnnnnnnnnnnnnnnnnnnnnnnnnnnnnnnnnnnnnnnnnnnnnnnnnnnnnnnnnnnnnnnnnnnnnnnnnnnnnnnnnnnnnnnnnnnnnnnnnnnnnnnnnnnnnnnnnnnnnnnnnnnnnnnnnnnnnnnnnnnnnnnnnnnnnnnnnnnnnnnnnnnnnnnnnnnnnnnnnnnnnnnnnnnnnnnnnnnnnnnnnnnnnnnnnnnnnnnnnnnnnnnnnnnnnnnnnnnnnnnnnnnnnnnnnnnnnnnnnnnnnnnnnnnnnnnnnnnnnnnnnnnnnnnnnnnnnnnnnnnnnnnnnnnnnnnnnnnnnnnnnnnnnnnnnnnnnnnnnnnnnnnnnnnnnnnnnnnnnnnnnnnnnnnnnnnnnnnnnnnnnnnnnnnnnnnnnnnnnnnnnnnnnnnnnnnnnnnnnnnnnnnnnnnnnnnnnnnnnnnnnnnnnnnnnnnnnnnnnnnnnnnnnnnnnnnnnnnnnnnnnnnnnnnnnnnnnnnnnnnnnnnnnnnnnnnnnnnnnnnnnnnnnnnnnnnnnnnnnnnnnnnnnnnnnnnnnnnnnnnnnnnnnnnnnnnnnnnnnnnnnnnnnnnnnnnnnnnnnnnnnnnnnnnnnnnnnnnnnnnnnnnnnnnnnnnnnnnnnnnnnnnnnnnnnnnnnnnnnnnnnnnnnnnnnnnnnnnnnnnnnnnnnnnnnnnnnnnnnnnnnnnnnnnnnnnnnnnnnnnnnnnnnnnnnnnnnnnnnnnnnnnnnnnnnnnnnnnnnnnnnnnnnnnnnnnnnnnnnnnnnnnnnnnnnnnnnnnnnnnnnnnnnnnnnnnnnnnnnnnnnnnnnnnnnnnnnnnnnnnnnnnnnnnnnnnnnnnnnnnnnnnnnnnnnnnnnnnnnnnnnnnnnnnnnnnnnnnnnnnnnnnnnnnnnnnnnnnnnnnnnnnnnnnnnnnnnnnnnnnnnnnnnnnnnnnnnnnnnnnnnnnnnnnnnnnnnnnnnnnnnnnnnnnnnnnnnnnnnnnnnnnnnnnnnnnnnnnnnnnnnnnnnnnnnnnnnnnnnnnnnnnnnnnnnnnnnnnnnnnnnnnnnnnnnnnnnnnnnnnnnnnnnnnnnnnnnnnnnnnnnnnnnnnnnnnnnnnnnnnnnnnnnnnnnnnnnnnnnnnnnnnnnnnnnnnnnnnnnnnnnnnnnnnnnnnnnnnnnnnnnnnnnnnnnnnnnnnnnnnnnnnnnnnnnnnnnnnnnnnnnnnnnnnnnnnnnnnnnnnnnnnnnnnnnnnnnnnnnnnnnnnnnnnnnnnnnnnnnnnnnnnnnnnnnnnnnnnnnnnnnnnnnnnnnnnnnnnnnnnnnnnnnnnnnnnnnnnnnnnnnnnnnnnnnnnnnnnnnnnnnnnnnnnnnnnnnnnnnnnnnnnnnnnnnnnnnnnnnnnnnnnnnnnnnnnnnnnnnnnnnnnnnnnnnnnnnnnnnnnnnnnnnnnnnnnnnnnnnnnnnnnnnnnnnnnnnnnnnnnnnnnnnnnnnnnnnnnnnnnnnnnnnnnnnnnnnnnnnnnnnnnnnnnnnnnnnnnnnnnnnnnnnnnnnnnnnnnnnnnnnnnnnnnnnnnnnnnnnnnnnnnnnnnnnnnnnnnnnnnnnnnnnnnnnnnnnnnnnnnnnnnnnnnnnnnnnnnnnnnnnnnnnnnnnnnnnnnnnnnnnnnnnnnnnnnnnnnnnnnnnnnnnnnnnnnnnnnnnnnnnnnnnnnnnnnnnnnnnnnnnnnnnnnnnnnnnnnnnnnnnnnnnnnnnnnnnnnnnnnnnnnnnnnnnnnnnnnnnnnnnnnnnnnnnnnnnnnnnnnnnnnnnnnnnnnnnnnnnnnnnnnnnnnnnnnnnnnnnnnnnnnnnnnnnnnnnnnnnnnnnnnnnnnnnnnnnnnnnnnnnnnnnnnnnnnnnnnnnnnnnnnnnnnnnnnnnnnnnnnnnnnnnnnnnnnnnnnnnnnnnnnnnnnnnnnnnnnnnnnnnnnnnnnnnnnnnnnnnnnnnnnnnnnnnnnnnnnnnnnnnnnnnnnnnnnnnnnnnnnnnnnnnnnnnnnnnnnnnnnnnnnnnnnnnnnnnnnnnnnnnnnnnnnnnnnnnnnnnnnnnnnnnnnnnnnnnnnnnnnnnnnnnnnnnnnnnnnnnnnnnnnnnnnnnnnnnnnnnnnnnnnnnnnnnnnnnnnnnnnnnnnnnnnnnnnnnnnnnnnnnnnnnnnnnnnnnnnnnnnnnnnnnnnnnnnnnnnnnnnnnnnnnnnnnnnnnnnnnnnnnnnnnnnnnnnnnnnnnnnnnnnnnnnnnnnnnnnnnnnnnnnnnnnnnnnnnnnnnnnnnnnnnnnnnnnnnnnnnnnnnnnnnnnnnnnnnnnnnnnnnnnnnnnnnnnnnnnnnnnnnnnnnnnnnnnnnnnnnnnnnnnnnnnnnnnnnnnnnnnnnnnnnnnnnnnnnnnnnnnnnnnnnnnnnnnnnnnnnnnnnnnnnnnnnnnnnnnnnnnnnnnnnnnnnnnnnnnnnnnnnnnnnnnnnnnnnnnnnnnnnnnnnnnnnnnnnnnnnnnnnnnnnnnnnnnnnnnnnnnnnnnnnnnnnnnnnnnnnnnnnnnnnnnnnnnnnnnnnnnnnnnnnnnnnnnnnnnnnnnnnnnnnnnnnnnnnnnnnnnnnnnnnnnnnnnnnnnnnnnnnnnnnnnnnnnnnnnnnnnnnnnnnnnnnnnnnnnnnnnnnnnnnnnnnnnnnnnnnnnnnnnnnnnnnnnnnnnnnnnnnnnnnnnnnnnnnnnnnnnnnnnnnnnnnnnnnnnnnnnnnnnnnnnnnnnnnnnnnnnnnnnnnnnnnnnnnnnnnnnnnnnnnnnnnnnnnnnnnnnnnnnnnnnnnnnnnnnnnnnnnnnnnnnnnnnnnnnnnnnnnnnnnnnnnnnnnnnnnnnnnnnnnnnnnnnnnnnnnnnnnnnnnnnnnnnnnnnnnnnnnnnnnnnnnnnnnnnnnnnnnnnnnnnnnnnnnnnnnnnnnnnnnnnnnnnnnnnnnnnnnnnnnnnnnnnnnnnnnnnnnnnnnnnnnnnnnnnnnnnnnnnnnnnnnnnnnnnnnnnnnnnnnnnnnnnnnnnnnnnnnnnnnnnnnnnnnnnnnnnnnnnnnnnnnnnnnnnnnnnnnnnnnnnnnnnnnnnnnnnnnnnnnnnnnnnnnnnnnnnnnnnnnnnnnnnnnnnnnnnnnnnnnnnnnnnnnnnnnnnnnnnnnnnnnnnnnnnnnnnnnnnnnnnnnnnnnnnnnnnnnnnnnnnnnnnnnnnnnnnnnnnnnnnnnnnnnnnnnnnnnnnnnnnnnnnnnnnnnnnnnnnnnnnnnnnnnnnnnnnnnnnnnnnnnnnnnnnnnnnnnnnnnnnnnnnnnnnnnnnnnnnnnnnnnnnnnnnnnnnnnnnnnnnnnnnnnnnnnnnnnnnnnnnnnnnnnnnnnnnnnnnnnnnnnnnnnnnnnnnnnnnnnnnnnnnnnnnnnnnnnnnnnnnnnnnnnnnnnnnnnnnnnnnnnnnnnnnnnnnnnnnnnnnnnnnnnnnnnnnnnnnnnnnnnnnnnnnnnnnnnnnnnnnnnnnnnnnnnnnnnnnnnnnnnnnnnnnnnnnnnnnnnnnnnnnnnnnnnnnnnnnnnnnnnnnnnnnnnnnnnnnnnnnnnnnnnnnnnnnnnnnnnnnnnnnnnnnnnnnnnnnnnnnnnnnnnnnnnnnnnnnnnnnnnnnnnnnnnnnnnnnnnnnnnnnnnnnnnnnnnnnnnnnnnnnnnnnnnnnnnnnnnnnnnnnnnnnnnnnnnnnnnnnnnnnnnnnnnnnnnnnnnnnnnnnnnnnnnnnnnnnnnnnnnnnnnnnnnnnnnnnnnnnnnnnnnnnnnnnnnnnnnnnnnnnnnnnnnnnnnnnnnnnnnnnnnnnnnnnnnnnnnnnnnnnnnnnnnnnnnnnnnnnnnnnnnnnnnnnnnnnnnnnnnnnnnnnnnnnnnnnnnnnnnnnnnnnnnnnnnnnnnnnnnnnnnnnnnnnnnnnnnnnnnnnnnnnnnnnnnnnnnnnnnnnnnnnnnnnnnnnnnnnnnnnnnnnnnnnnnnnnnnnnnnnnnnnnnnnnnnnnnnnnnnnnnnnnnnnnnnnnnnnnnnnnnnnnnnnnnnnnnnnnnnnnnnnnnnnnnnnnnnnnnnnnnnnnnnnnnnnnnnnnnnnnnnnnnnnnnnnnnnnnnnnnnnnnnnnnnnnnnnnnnnnnnnnnnnnnnnnnnnnnnnnnnnnnnnnnnnnnnnnnnnnnnnnnnnnnnnnnnnnnnnnnnnnnnnnnnnnnnnnnnnnnnnnnnnnnnnnnnnnnnnnnnnnnnnnnnnnnnnnnnnnnnnnnnnnnnnnnnnnnnnnnnnnnnnnnnnnnnnnnnnnnnnnnnnnnnnnnnnnnnnnnnnnnnnnnnnnnnnnnnnnnnnnnnnnnnnnnnnnnnnnnnnnnnnnnnnnnnnnnnnnnnnnnnnnnnnnnnnnnnnnnnnnnnnnnnnnnnnnnnnnnnnnnnnnnnnnnnnnnnnnnnnnnnnnnnnnnnnnnnnnnnnnnnnnnnnnnnnnnnnnnnnnnnnnnnnnnnnnnnnnnnnnnnnnnnnnnnnnnnnnnnnnnnnnnnnnnnnnnnnnnnnnnnnnnnnnnnnnnnnnnnnnnnnnnnnnnnnnnnnnnnnnnnnnnnnnnnnnnnnnnnnnnnnnnnnnnnnnnnnnnnnnnnnnnnnnnnnnnnnnnnnnnnnnnnnnnnnnnnnnnnnnnnnnnnnnnnnnnnnnnnnnnnnnnnnnnnnnnnnnnnnnnnnnnnnnnnnnnnnnnnnnnnnnnnnnnnnnnnnnnnnnnnnnnnnnnnnnnnnnnnnnnnnnnnnnnnnnnnnnnnnnnnnnnnnnnnnnnnnnnnnnnnnnnnnnnnnnnnnnnnnnnnnnnnnnnnnnnnnnnnnnnnnnnnnnnnnnnnnnnnnnnnnnnnnnnnnnnnnnnnnnnnnnnnnnnnnnnnnnnnnnnnnnnnnnnnnnnnnnnnnnnnnnnnnnnnnnnnnnnnnnnnnnnnnnnnnnnnnnnnnnnnnnnnnnnnnnnnnnnnnnnnnnnnnnnnnnnnnnnnnnnnnnnnnnnnnnnnnnnnnnnnnnnnnnnnnnnnnnnnnnnnnnnnnnnnnnnnnnnnnnnnnnnnnnnnnnnnnnnnnnnnnnnnnnnnnnnnnnnnnnnnnnnnnnnnnnnnnnnnnnnnnnnnnnnnnnnnnnnnnnnnnnnnnnnnnnnnnnnnnnnnnnnnnnnnnnnnnnnnnnnnnnnnnnnnnnnnnnnnnnnnnnnnnnnnnnnnnnnnnnnnnnnnnnnnnnnnnnnnnnnnnnnnnnnnnnnnnnnnnnnnnnnnnnnnnnnnnnnnnnnnnnnnnnnnnnnnnnnnnnnnnnnnnnnnnnnnnnnnnnnnnnnnnnnnnnnnnnnnnnnnnnnnnnnnnnnnnnnnnnnnnnnnnnnnnnnnnnnnnnnnnnnnnnnnnnnnnnnnnnnnnnnnnnnnnnnnnnnnnnnnnnnnnnnnnnnnnnnnnnnnnnnnnnnnnnnnnnnnnnnnnnnnnnnnnnnnnnnnnnnnnnnnnnnnnnnnnnnnnnnnnnnnnnnnnnnnnnnnnnnnnnnnnnnnnnnnnnnnnnnnnnnnnnnnnnnnnnnnnnnnnnnnnnnnnnnnnnnnnnnnnnnnnnnnnnnnnnnnnnnnnnnnnnnnnnnnnnnnnnnnnnnnnnnnnnnnnnnnnnnnnnnnnnnnnnnnnnnnnnnnnnnnnnnnnnnnnnnnnnnnnnnnnnnnnnnnnnnnnnnnnnnnnnnnnnnnnnnnnnnnnnnnnnnnnnnnnnnnnnnnnnnnnnnnnnnnnnnnnnnnnnnnnnnnnnnnnnnnnnnnnnnnnnnnnnnnnnnnnnnnnnnnnnnnnnnnnnnnnnnnnnnnnnnnnnnnnnnnnnnnnnnnnnnnnnnnnnnnnnnnnnnnnnnnnnnnnnnnnnnnnnnnnnnnnnnnnnnnnnnnnnnnnnnnnnnnnnnnnnnnnnnnnnnnnnnnnnnnnnnnnnnnnnnnnnnnnnnnnnnnnnnnnnnnnnnnnnnnnnnnnnnnnnnnnnnnnnnnnnnnnnnnnnnnnnnnnnnnnnnnnnnnnnnnnnnnnnnnnnnnnnnnnnnnnnnnnnnnnnnnnnnnnnnnnnnnnnnnnnnnnnnnnnnnnnnnnnnnnnnnnnnnnnnnnnnnnnnnnnnnnnnnnnnnnnnnnnnnnnnnnnnnnnnnnnnnnnnnnnnnnnnnnnnnnnnnnnnnnnnnnnnnnnnnnnnnnnnnnnnnnnnnnnnnnnnnnnnnnnnnnnnnnnnnnnnnnnnnnnnnnnnnnnnnnnnnnnnnnnnnnnnnnnnnnnnnnnnnnnnnnnnnnnnnnnnnnnnnnnnnnnnnnnnnnnnnnnnnnnnnnnnnnnnnnnnnnnnnnnnnnnnnnnnnnnnnnnnnnnnnnnnnnnnnnnnnnnnnnnnnnnnnnnnnnnnnnnnnnnnnnnnnnnnnnnnnnnnnnnnnnnnnnnnnnnnnnnnnnnnnnnnnnnnnnnnnnnnnnnnnnnnnnnnnnnnnnnnnnnnnnnnnnnnnnnnnnnnnnnnnnnnnnnnnnnnnnnnnnnnnnnnnnnnnnnnnnnnnnnnnnnnnnnnnnnnnnnnnnnnnnnnnnnnnnnnnnnnnnnnnnnnnnnnnnnnnnnnnnnnnnnnnnnnnnnnnnnnnnnnnnnnnnnnnnnnnnnnnnnnnnnnnnnnnnnnnnnnnnnnnnnnnnnnnnnnnnnnnnnnnnnnnnnnnnnnnnnnnnnnnnnnnnnnnnnnnnnnnnnnnnnnnnnnnnnnnnnnnnnnnnnnnnnnnnnnnnnnnnnnnnnnnnnnnnnnnnnnnnnnnnnnnnnnnnnnnnnnnnnnnnnnnnnnnnnnnnnnnnnnnnnnnnnnnnnnnnnnnnnnnnnnnnnnnnnnnnnnnnnnnnnnnnnnnnnnnnnnnnnnnnnnnnnnnnnnnnnnnnnnnnnnnnnnnnnnnnnnnnnnnnnnnnnnnnnnnnnnnnnnnnnnnnnnnnnnnnnnnnnnnnnnnnnnnnnnnnnnnnnnnnnnnnnnnnnnnnnnnnnnnnnnnnnnnnnnnnnnnnnnnnnnnnnnnnnnnnnnnnnnnnnnnnnnnnnnnnnnnnnnnnnnnnnnnnnnnnnnnnnnnnnnnnnnnnnnnnnnnnnnnnnnnnnnnnnnnnnnnnnnnnnnnnnnnnnnnnnnnnnnnnnnnnnnnnnnnnnnnnnnnnnnnnnnnnnnnnnnnnnnnnnnnnnnnnnnnnnnnnnnnnnnnnnnnnnnnnnnnnnnnnnnnnnnnnnnnnnnnnnnnnnnnnnnnnnnnnnnnnnnnnnnnnnnnnnnnnnnnnnnnnnnnnnnnnnnnnnnnnnnnnnnnnnnnnnnnnnnnnnnnnnnnnnnnnnnnnnnnnnnnnnnnnnnnnnnnnnnnnnnnnnnnnnnnnnnnnnnnnnnnnnnnnnnnnnnnnnnnnnnnnnnnnnnnnnnnnnnnnnnnnnnnnnnnnnnnnnnnnnnnnnnnnnnnnnnnnnnnnnnnnnnnnnnnnnnnnnnnnnnnnnnnnnnnnnnnnnnnnnnnnnnnnnnnnnnnnnnnnnnnnnnnnnnnnnnnnnnnnnnnnnnnnnnnnnnnnnnnnnnnnnnnnnnnnnnnnnnnnnnnnnnnnnnnnnnnnnnnnnnnnnnnnnnnnnnnnnnnnnnnnnnnnnnnnnnnnnnnnnnnnnnnnnnnnnnnnnnnnnnnnnnnnnnnnnnnnnnnnnnnnnnnnnnnnnnnnnnnnnnnnnnnnnnnnnnnnnnnnnnnnnnnnnnnnnnnnnnnnnnnnnnnnnnnnnnnnnnnnnnnnnnnnnnnnnnnnnnnnnnnnnnnnnnnnnnnnnnnnnnnnnnnnnnnnnnnnnnnnnnnnnnnnnnnnnnnnnnnnnnnnnnnnnnnnnnnnnnnnnnnnnnnnnnnnnnnnnnnnnnnnnnnnnnnnnnnnnnnnnnnnnnnnnnnnnnnnnnnnnnnnnnnnnnnnnnnnnnnnnnnnnnnnnnnnnnnnnnnnnnnnnnnnnnnnnnnnnnnnnnnnnnnnnnnnnnnnnnnnnnnnnnnnnnnnnnnnnnnnnnnnnnnnnnnnnnnnnnnnnnnnnnnnnnnnnnnnnnnnnnnnnnnnnnnnnnnnnnnnnnnnnnnnnnnnnnnnnnnnnnnnnnnnnnnnnnnnnnnnnnnnnnnnnnnnnnnnnnnnnnnnnnnnnnnnnnnnnnnnnnnnnnnnnnnnnnnnnnnnnnnnnnnnnnnnnnnnnnnnnnnnnnnnnnnnnnnnnnnnnnnnnnnnnnnnnnnnnnnnnnnnnnnnnnnnnnnnnnnnnnnnnnnnnnnnnnnnnnnnnnnnnnnnnnnnnnnnnnnnnnnnnnnnnnnnnnnnnnnnnnnnnnnnnnnnnnnnnnnnnnnnnnnnnnnnnnnnnnnnnnnnnnnnnnnnnnnnnnnnnnnnnnnnnnnnnnnnnnnnnnnnnnnnnnnnnnnnnnnnnnnnnnnnnnnnnnnnnnnnnnnnnnnnnnnnnnnnnnnnnnnnnnnnnnnnnnnnnnnnnnnnnnnnnnnnnnnnnnnnnnnnnnnnnnnnnnnnnnnnnnnnnnnnnnnnnnnnnnnnnnnnnnnnnnnnnnnnnnnnnnnnnnnnnnnnnnnnnnnnnnnnnnnnnnnnnnnnnnnnnnnnnnnnnnnnnnnnnnnnnnnnnnnnnnnnnnnnnnnnnnnnnnnnnnnnnnnnnnnnnnnnnnnnnnnnnnnnnnnnnnnnnnnnnnnnnnnnnnnnnnnnnnnnnnnnnnnnnnnnnnnnnnnnnnnnnnnnnnnnnnnnnnnnnnnnnnnnnnnnnnnnnnnnnnnnnnnnnnnnnnnnnnnnnnnnnnnnnnnnnnnnnnnnnnnnnnnnnnnnnnnnnnnnnnnnnnnnnnnnnnnnnnnnnnnnnnnnnnnnnnnnnnnnnnnnnnnnnnnnnnnnnnnnnnnnnnnnnnnnnnnnnnnnnnnnnnnnnnnnnnnnnnnnnnnnnnnnnnnnnnnnnnnnnnnnnnnnnnnnnnnnnnnnnnnnnnnnnnnnnnnnnnnnnnnnnnnnnnnnnnnnnnnnnnnnnnnnnnnnnnnnnnnnnnnnnnnnnnnnnnnnnnnnnnnnnnnnnnnnnnnnnnnnnnnnnnnnnnnnnnnnnnnnnnnnnnnnnnnnnnnnnnnnnnnnnnnnnnnnnnnnnnnnnnnnnnnnnnnnnnnnnnnnnnnnnnnnnnnnnnnnnnnnnnnnnnnnnnnnnnnnnnnnnnnnnnnnnnnnnnnnnnnnnnnnnnnnnnnnnnnnnnnnnnnnnnnnnnnnnnnnnnnnnnnnnnnnnnnnnnnnnnnnnnnnnnnnnnnnnnnnnnnnnnnnnnnnnnnnnnnnnnnnnnnnnnnnnnnnnnnnnnnnnnnnnnnnnnnnnnnnnnnnnnnnnnnnnnnnnnnnnnnnnnnnnnnnnnnnnnnnnnnnnnnnnnnnnnnnnnnnnnnnnnnnnnnnnnnnnnnnnnnnnnnnnnnnnnnnnnnnnnnnnnnnnnnnnnnnnnnnnnnnnnnnnnnnnnnnnnnnnnnnnnnnnnnnnnnnnnnnnnnnnnnnnnnnnnnnnnnnnnnnnnnnnnnnnnnnnnnnnnnnnnnnnnnnnnnnnnnnnnnnnnnnnnnnnnnnnnnnnnnnnnnnnnnnnnnnnnnnnnnnnnnnnnnnnnnnnnnnnnnnnnnnnnnnnnnnnnnnnnnnnnnnnnnnnnnnnnnnnnnnnnnnnnnnnnnnnnnnnnnnnnnnnnnnnnnnnnnnnnnnnnnnnnnnnnnnnnnnnnnnnnnnnnnnnnnnnnnnnnnnnnnnnnnnnnnnnnnnnnnnnnnnnnnnnnnnnnnnnnnnnnnnnnnnnnnnnnnnnnnnnnnnnnnnnnnnnnnnnnnnnnnnnnnnnnnnnnnnnnnnnnnnnnnnnnnnnnnnnnnnnnnnnnnnnnnnnnnnnnnnnnnnnnnnnnnnnnnnnnnnnnnnnnnnnnnnnnnnnnnnnnnnnnnnnnnnnnnnnnnnnnnnnnnnnnnnnnnnnnnnnnnnnnnnnnnnnnnnnnnnnnnnnnnnnnnnnnnnnnnnnnnnnnnnnnnnnnnnnnnnnnnnnnnnnnnnnnnnnnnnnnnnnnnnnnnnnnnnnnnnnnnnnnnnnnnnnnnnnnnnnnnnnnnnnnnnnnnnnnnnnnnnnnnnnnnnnnnnnnnnnnnnnnnnnnnnnnnnnnnnnnnnnnnnnnnnnnnnnnnnnnnnnnnnnnnnnnnnnnnnnnnnnnnnnnnnnnnnnnnnnnnnnnnnnnnnnnnnnnnnnnnnnnnnnnnnnnnnnnnnnnnnnnnnnnnnnnnnnnnnnnnnnnnnnnnnnnnnnnnnnnnnnnnnnnnnnnnnnnnnnnnnnnnnnnnnnnnnnnnnnnnnnnnnnnnnnnnnnnnnnnnnnnnnnnnnnnnnnnnnnnnnnnnnnnnnnnnnnnnnnnnnnnnnnnnnnnnnnnnnnnnnnnnnnnnnnnnnnnnnnnnnnnnnnnnnnnnnnnnnnnnnnnnnnnnnnnnnnnnnnnnnnnnnnnnnnnnnnnnnnnnnnnnnnnnnnnnnnnnnnnnnnnnnnnnnnnnnnnnnnnnnnnnnnnnnnnnnnnnnnnnnnnnnnnnnnnnnnnnnnnnnnnnnnnnnnnnnnnnnnnnnnnnnnnnnnnnnnnnnnnnnnnnnnnnnnnnnnnnnnnnnnnnnnnnnnnnnnnnnnnnnnnnnnnnnnnnnnnnnnnnnnnnnnnnnnnnnnnnnnnnnnnnnnnnnnnnnnnnnnnnnnnnnnnnnnnnnnnnnnnnnnnnnnnnnnnnnnnnnnnnnnnnnnnnnnnnnnnnnnnnnnnnnnnnnnnnnnnnnnnnnnnnnnnnnnnnnnnnnnnnnnnnnnnnnnnnnnnnnnnnnnnnnnnnnnnnnnnnnnnnnnnnnnnnnnnnnnnnnnnnnnnnnnnnnnnnnnnnnnnnnnnnnnnnnnnnnnnnnnnnnnnnnnnnnnnnnnnnnnnnnnnnnnnnnnnnnnnnnnnnnnnnnnnnnnnnnnnnnnnnnnnnnnnnnnnnnnnnnnnnnnnnnnnnnnnnnnnnnnnnnnnnnnnnnnnnnnnnnnnnnnnnnnnnnnnnnnnnnnnnnnnnnnnnnnnnnnnnnnnnnnnnnnnnnnnnnnnnnnnnnnnnnnnnnnnnnnnnnnnnnnnnnnnnnnnnnnnnnnnnnnnnnnnnnnnnnnnnnnnnnnnnnnnnnnnnnnnnnnnnnnnnnnnnnnnnnnnnnnnnnnnnnnnnnnnnnnnnnnnnnnnnnnnnnnnnnnnnnnnnnnnnnnnnnnnnnnnnnnnnnnnnnnnnnnnnnnnnnnnnnnnnnnnnnnnnnnnnnnnnnnnnnnnnnnnnnnnnnnnnnnnnnnnnnnnnnnnnnnnnnnnnnnnnnnnnnnnnnnnnnnnnnnnnnnnnnnnnnnnnnnnnnnnnnnnnnnnnnnnnnnnnnnnnnnnnnnnnnnnnnnnnnnnnnnnnnnnnnnnnnnnnnnnnnnnnnnnnnnnnnnnnnnnnnnnnnnnnnnnnnnnnnnnnnnnnnnnnnnnnnnnnnnnnnnnnnnnnnnnnnnnnnnnnnnnnnnnnnnnnnnnnnnnnnnnnnnnnnnnnnnnnnnnnnnnnnnnnnnnnnnnnnnnnnnnnnnnnnnnnnnnnnnnnnnnnnnnnnnnnnnnnnnnnnnnnnnnnnnnnnnnnnnnnnnnnnnnnnnnnnnnnnnnnnnnnnnnnnnnnnnnnnnnnnnnnnnnnnnnnnnnnnnnnnnnnnnnnnnnnnnnnnnnnnnnnnnnnnnnnnnnnnnnnnnnnnnnnnnnnnnnnnnnnnnnnnnnnnnnnnnnnnnnnnnnnnnnnnnnnnnnnnnnnnnnnnnnnnnnnnnnnnnnnnnnnnnnnnnnnnnnnnnnnnnnnnnnnnnnnnnnnnnnnnnnnnnnnnnnnnnnnnnnnnnnnnnnnnnnnnnnnnnnnnnnnnnnnnnnnnnnnnnnnnnnnnnnnnnnnnnnnnnnnnnnnnnnnnnnnnnnnnnnnnnnnnnnnnnnnnnnnnnnnnnnnnnnnnnnnnnnnnnnnnnnnnnnnnnnnnnnnnnnnnnnnnnnnnnnnnnnnnnnnnnnnnnnnnnnnnnnnnnnnnnnnnnnnnnnnnnnnnnnnnnnnnnnnnnnnnnnnnnnnnnnnnnnnnnnnnnnnnnnnnnnnnnnnnnnnnnnnnnnnnnnnnnnnnnnnnnnnnnnnnnnnnnnnnnnnnnnnnnnnnnnnnnnnnnnnnnnnnnnnnnnnnnnnnnnnnnnnnnnnnnnnnnnnnnnnnnnnnnnnnnnnnnnnnnnnnnnnnnnnnnnnnnnnnnnnnnnnnnnnnnnnnnnnnnnnnnnnnnnnnnnnnnnnnnnnnnnnnnnnnnnnnnnnnnnnnnnnnnnnnnnnnnnnnnnnnnnnnnnnnnnnnnnnnnnnnnnnnnnnnnnnnnnnnnnnnnnnnnnnnnnnnnnnnnnnnnnnnnnnnnnnnnnnnnnnnnnnnnnnnnnnnnnnnnnnnnnnnnnnnnnnnnnnnnnnnnnnnnnnnnnnnnnnnnnnnnnnnnnnnnnnnnnnnnnnnnnnnnnnnnnnnnnnnnnnnnnnnnnnnnnnnnnnnnnnnnnnnnnnnnnnnnnnnnnnnnnnnnnnnnnnnnnnnnnnnnnnnnnnnnnnnnnnnnnnnnnnnnnnnnnnnnnnnnnnnnnnnnnnnnnnnnnnnnnnnnnnnnnnnnnnnnnnnnnnnnnnnnnnnnnnnnnnnnnnnnnnnnnnnnnnnnnnnnnnnnnnnnnnnnnnnnnnnnnnnnnnnnnnnnnnnnnnnnnnnnnnnnnnnnnnnnnnnnnnnnnnnnnnnnnnnnnnnnnnnnnnnnnnnnnnnnnnnnnnnnnnnnnnnnnnnnnnnnnnnnnnnnnnnnnnnnnnnnnnnnnnnnnnnnnnnnnnnnnnnnnnnnnnnnnnnnnnnnnnnnnnnnnnnnnnnnnnnnnnnnnnnnnnnnnnnnnnnnnnnnnnnnnnnnnnnnnnnnnnnnnnnnnnnnnnnnnnnnnnnnnnnnnnnnnnnnnnnnnnnnnnnnnnnnnnnnnnnnnnnnnnnnnnnnnnnnnnnnnnnnnnnnnnnnnnnnnnnnnnnnnnnnnnnnnnnnnnnnnnnnnnnnnnnnnnnnnnnnnnnnnnnnnnnnnnnnnnnnnnnnnnnnnnnnnnnnnnnnnnnnnnnnnnnnnnnnnnnnnnnnnnnnnnnnnnnnnnnnnnnnnnnnnnnnnnnnnnnnnnnnnnnnnnnnnnnnnnnnnnnnnnnnnnnnnnnnnnnnnnnnnnnnnnnnnnnnnnnnnnnnnnnnnnnnnnnnnnnnnnnnnnnnnnnnnnnnnnnnnnnnnnnnnnnnnnnnnnnnnnnnnnnnnnnnnnnnnnnnnnnnnnnnnnnnnnnnnnnnnnnnnnnnnnnnnnnnnnnnnnnnnnnnnnnnnnnnnnnnnnnnnnnnnnnnnnnnnnnnnnnnnnnnnnnnnnnnnnnnnnnnnnnnnnnnnnnnnnnnnnnnnnnnnnnnnnnnnnnnnnnnnnnnnnnnnnnnnnnnnnnnnnnnnnnnnnnnnnnnnnnnnnnnnnnnnnnnnnnnnnnnnnnnnnnnnnnnnnnnnnnnnnnnnnnnnnnnnnnnnnnnnnnnnnnnnnnnnnnnnnnnnnnnnnnnnnnnnnnnnnnnnnnnnnnnnnnnnnnnnnnnnnnnnnnnnnnnnnnnnnnnnnnnnnnnnnnnnnnnnnnnnnnnnnnnnnnnnnnnnnnnnnnnnnnnnnnnnnnnnnnnnnnnnnnnnnnnnnnnnnnnnnnnnnnnnnnnnnnnnnnnnnnnnnnnnnnnnnnnnnnnnnnnnnnnnnnnnnnnnnnnnnnnnnnnnnnnnnnnnnnnnnnnnnnnnnnnnnnnnnnnnnnnnnnnnnnnnnnnnnnnnnnnnnnnnnnnnnnnnnnnnnnnnnnnnnnnnnnnnnnnnnnnnnnnnnnnnnnnnnnnnnnnnnnnnnnnnnnnnnnnnnnnnnnnnnnnnnnnnnnnnnnnnnnnnnnnnnnnnnnnnnnnnnnnnnnnnnnnnnnnnnnnnnnnnnnnnnnnnnnnnnnnnnnnnnnnnnnnnnnnnnnnnnnnnnnnnnnnnnnnnnnnnnnnnnnnnnnnnnnnnnnnnnnnnnnnnnnnnnnnnnnnnnnnnnnnnnnnnnnnnnnnnnnnnnnnnnnnnnnnnnnnnnnnnnnnnnnnnnnnnnnnnnnnnnnnnnnnnnnnnnnnnnnnnnnnnnnnnnnnnnnnnnnnnnnnnnnnnnnnnnnnnnnnnnnnnnnnnnnnnnnnnnnnnnnnnnnnnnnnnnnnnnnnnnnnnnnnnnnnnnnnnnnnnnnnnnnnnnnnnnnnnnnnnnnnnnnnnnnnnnnnnnnnnnnnnnnnnnnnnnnnnnnnnnnnnnnnnnnnnnnnnnnnnnnnnnnnnnnnnnnnnnnnnnnnnnnnnnnnnnnnnnnnnnnnnnnnnnnnnnnnnnnnnnnnnnnnnnnnnnnnnnnnnnnnnnnnnnnnnnnnnnnnnnnnnnnnnnnnnnnnnnnnnnnnnnnnnnnnnnnnnnnnnnnnnnnnnnnnnnnnnnnnnnnnnnnnnnnnnnnnnnnnnnnnnnnnnnnnnnnnnnnnnnnnnnnnnnnnnnnnnnnnnnnnnnnnnnnnnnnnnnnnnnnnnnnnnnnnnnnnnnnnnnnnnnnnnnnnnnnnnnnnnnnnnnnnnnnnnnnnnnnnnnnnnnnnnnnnnnnnnnnnnnnnnnnnnnnnnnnnnnnnnnnnnnnnnnnnnnnnnnnnnnnnnnnnnnnnnnnnnnnnnnnnnnnnnnnnnnnnnnnnnnnnnnnnnnnnnnnnnnnnnnnnnnnnnnnnnnnnnnnnnnnnnnnnnnnnnnnnnnnnnnnnnnnnnnnnnnnnnnnnnnnnnnnnnnnnnnnnnnnnnnnnnnnnnnnnnnnnnnnnnnnnnnnnnnnnnnnnnnnnnnnnnnnnnnnnnnnnnnnnnnnnnnnnnnnnnnnnnnnnnnnnnnnnnnnnnnnnnnnnnnnnnnnnnnnnnnnnnnnnnnnnnnnnnnnnnnnnnnnnnnnnnnnnnnnnnnnnnnnnnnnnnnnnnnnnnnnnnnnnnnnnnnnnnnnnnnnnnnnnnnnnnnnnnnnnnnnnnnnnnnnnnnnnnnnnnnnnnnnnnnnnnnnnnnnnnnnnnnnnnnnnnnnnnnnnnnnnnnnnnnnnnnnnnnnnnnnnnnnnnnnnnnnnnnnnnnnnnnnnnnnnnnnnnnnnnnnnnnnnnnnnnnnnnnnnnnnnnnnnnnnnnnnnnnnnnnnnnnnnnnnnnnnnnnnnnnnnnnnnnnnnnnnnnnnnnnnnnnnnnnnnnnnnnnnnnnnnnnnnnnnnnnnnnnnnnnnnnnnnnnnnnnnnnnnnnnnnnnnnnnnnnnnnnnnnnnnnnnnnnnnnnnnnnnnnnnnnnnnnnnnnnnnnnnnnnnnnnnnnnnnnnnnnnnnnnnnnnnnnnnnnnnnnnnnnnnnnnnnnnnnnnnnnnnnnnnnnnnnnnnnnnnnnnnnnnnnnnnnnnnnnnnnnnnnnnnnnnnnnnnnnnnnnnnnnnnnnnnnnnnnnnnnnnnnnnnnnnnnnnnnnnnnnnnnnnnnnnnnnnnnnnnnnnnnnnnnnnnnnnnnnnnnnnnnnnnnnnnnnnnnnnnnnnnnnnnnnnnnnnnnnnnnnnnnnnnnnnnnnnnnnnnnnnnnnnnnnnnnnnnnnnnnnnnnnnnnnnnnnnnnnnnnnnnnnnnnnnnnnnnnnnnnnnnnnnnnnnnnnnnnnnnnnnnnnnnnnnnnnnnnnnnnnnnnnnnnnnnnnnnnnnnnnnnnnnnnnnnnnnnnnnnnnnnnnnnnnnnnnnnnnnnnnnnnnnnnnnnnnnnnnnnnnnnnnnnnnnnnnnnnnnnnnnnnnnnnnnnnnnnnnnnnnnnnnnnnnnnnnnnnnnnnnnnnnnnnnnnnnnnnnnnnnnnnnnnnnnnnnnnnnnnnnnnnnnnnnnnnnnnnnnnnnnnnnnnnnnnnnnnnnnnnnnnnnnnnnnnnnnnnnnnnnnnnnnnnnnnnnnnnnnnnnnnnnnnnnnnnnnnnnnnnnnnnnnnnnnnnnnnnnnnnnnnnnnnnnnnnnnnnnnnnnnnnnnnnnnnnnnnnnnnnnnnnnnnnnnnnnnnnnnnnnnnnnnnnnnnnnnnnnnnnnnnnnnnnnnnnnnnnnnnnnnnnnnnnnnnnnnnnnnnnnnnnnnnnnnnnnnnnnnnnnnnnnnnnnnnnnnnnnnnnnnnnnnnnnnnnnnnnnnnnnnnnnnnnnnnnnnnnnnnnnnnnnnnnnnnnnnnnnnnnnnnnnnnnnnnnnnnnnnnnnnnnnnnnnnnnnnnnnnnnnnnnnnnnnnnnnnnnnnnnnnnnnnnnnnnnnnnnnnnnnnnnnnnnnnnnnnnnnnnnnnnnnnnnnnnnnnnnnnnnnnnnnnnnnnnnnnnnnnnnnnnnnnnnnnnnnnnnnnnnnnnnnnnnnnnnnnnnnnnnnnnnnnnnnnnnnnnnnnnnnnnnnnnnnnnnnnnnnnnnnnnnnnnnnnnnnnnnnnnnnnnnnnnnnnnnnnnnnnnnnnnnnnnnnnnnnnnnnnnnnnnnnnnnnnnnnnnnnnnnnnnnnnnnnnnnnnnnnnnnnnnnnnnnnnnnnnnnnnnnnnnnnnnnnnnnnnnnnnnnnnnnnnnnnnnnnnnnnnnnnnnnnnnnnnnnnnnnnnnnnnnnnnnnnnnnnnnnnnnnnnnnnnnnnnnnnnnnnnnnnnnnnnnnnnnnnnnnnnnnnnnnnnnnnnnnnnnnnnnnnnnnnnnnnnnnnnnnnnnnnnnnnnnnnnnnnnnnnnnnnnnnnnnnnnnnnnnnnnnnnnnnnnnnnnnnnnnnnnnnnnnnnnnnnnnnnnnnnnnnnnnnnnnnnnnnnnnnnnnnnnnnnnnnnnnnnnnnnnnnnnnnnnnnnnnnnnnnnnnnnnnnnnnnnnnnnnnnnnnnnnnnnnnnnnnnnnnnnnnnnnnnnnnnnnnnnnnnnnnnnnnnnnnnnnnnnnnnnnnnnnnnnnnnnnnnnnnnnnnnnnnnnnnnnnnnnnnnnnnnnnnnnnnnnnnnnnnnnnnnnnnnnnnnnnnnnnnnnnnnnnnnnnnnnnnnnnnnnnnnnnnnnnnnnnnnnnnnnnnnnnnnnnnnnnnnnnnnnnnnnnnnnnnnnnnnnnnnnnnnnnnnnnnnnnnnnnnnnnnnnnnnnnnnnnnnnnnnnnnnnnnnnnnnnnnnnnnnnnnnnnnnnnnnnnnnnnnnnnnnnnnnnnnnnnnnnnnnnnnnnnnnnnnnnnnnnnnnnnnnnnnnnnnnnnnnnnnnnnnnnnnnnnnnnnnnnnnnnnnnnnnnnnnnnnnnnnnnnnnnnnnnnnnnnnnnnnnnnnnnnnnnnnnnnnnnnnnnnnnnnnnnnnnnnnnnnnnnnnnnnnnnnnnnnnnnnnnnnnnnnnnnnnnnnnnnnnnnnnnnnnnnnnnnnnnnnnnnnnnnnnnnnnnnnnnnnnnnnnnnnnnnnnnnnnnnnnnnnnnnnnnnnnnnnnnnnnnnnnnnnnnnnnnnnnnnnnnnnnnnnnnnnnnnnnnnnnnnnnnnnnnnnnnnnnnnnnnnnnnnnnnnnnnnnnnnnnnnnnnnnnnnnnnnnnnnnnnnnnnnnnnnnnnnnnnnnnnnnnnnnnnnnnnnnnnnnnnnnnnnnnnnnnnnnnnnnnnnnnnnnnnnnnnnnnnnnnnnnnnnnnnnnnnnnnnnnnnnnnnnnnnnnnnnnnnnnnnnnnnnnnnnnnnnnnnnnnnnnnnnnnnnnnnnnnnnnnnnnnnnnnnnnnnnnnnnnnnnnnnnnnnnnnnnnnnnnnnnnnnnnnnnnnnnnnnnnnnnnnnnnnnnnnnnnnnnnnnnnnnnnnnnnnnnnnnnnnnnnnnnnnnnnnnnnnnnnnnnnnnnnnnnnnnnnnnnnnnnnnnnnnnnnnnnnnnnnnnnnnnnnnnnnnnnnnnnnnnnnnnnnnnnnnnnnnnnnnnnnnnnnnnnnnnnnnnnnnnnnnnnnnnnnnnnnnnnnnnnnnnnnnnnnnnnnnnnnnnnnnnnnnnnnnnnnnnnnnnnnnnnnnnnnnnnnnnnnnnnnnnnnnnnnnnnnnnnnnnnnnnnnnnnnnnnnnnnnnnnnnnnnnnnnnnnnnnnnnnnnnnnnnnnnnnnnnnnnnnnnnnnnnnnnnnnnnnnnnnnnnnnnnnnnnnnnnnnnnnnnnnnnnnnnnnnnnnnnnnnnnnnnnnnnnnnnnnnnnnnnnnnnnnnnnnnnnnnnnnnnnnnnnnnnnnnnnnnnnnnnnnnnnnnnnnnnnnnnnnnnnnnnnnnnnnnnnnnnnnnnnnnnnnnnnnnnnnnnnnnnnnnnnnnnnnnnnnnnnnnnnnnnnnnnnnnnnnnnnnnnnnnnnnnnnnnnnnnnnnnnnnnnnnnnnnnnnnnnnnnnnnnnnnnnnnnnnnnnnnnnnnnnnnnnnnnnnnnnnnnnnnnnnnnnnnnnnnnnnnnnnnnnnnnnnnnnnnnnnnnnnnnnnnnnnnnnnnnnnnnnnnnnnnnnnnnnnnnnnnnnnnnnnnnnnnnnnnnnnnnnnnnnnnnnnnnnnnnnnnnnnnnnnnnnnnnnnnnnnnnnnnnnnnnnnnnnnnnnnnnnnnnnnnnnnnnnnnnnnnnnnnnnnnnnnnnnnnnnnnnnnnnnnnnnnnnnnnnnnnnnnnnnnnnnnnnnnnnnnnnnnnnnnnnnnnnnnnnnnnnnnnnnnnnnnnnnnnnnnnnnnnnnnnnnnnnnnnnnnnnnnnnnnnnnnnnnnnnnnnnnnnnnnnnnnnnnnnnnnnnnnnnnnnnnnnnnnnnnnnnnnnnnnnnnnnnnnnnnnnnnnnnnnnnnnnnnnnnnnnnnnnnnnnnnnnnnnnnnnnnnnnnnnnnnnnnnnnnnnnnnnnnnnnnnnnnnnnnnnnnnnnnnnnnnnnnnnnnnnnnnnnnnnnnnnnnnnnnnnnnnnnnnnnnnnnnnnnnnnnnnnnnnnnnnnnnnnnnnnnnnnnnnnnnnnnnnnnnnnnnnnnnnnnnnnnnnnnnnnnnnnnnnnnnnnnnnnnnnnnnnnnnnnnnnnnnnnnnnnnnnnnnnnnnnnnnnnnnnnnnnnnnnnnnnnnnnnnnnnnnnnnnnnnnnnnnnnnnnnnnnnnnnnnnnnnnnnnnnnnnnnnnnnnnnnnnnnnnnnnnnnnnnnnnnnnnnnnnnnnnnnnnnnnnnnnnnnnnnnnnnnnnnnnnnnnnnnnnnnnnnnnnnnnnnnnnnnnnnnnnnnnnnnnnnnnnnnnnnnnnnnnnnnnnnnnnnnnnnnnnnnnnnnnnnnnnnnnnnnnnnnnnnnnnnnnnnnnnnnnnnnnnnnnnnnnnnnnnnnnnnnnnnnnnnnnnnnnnnnnnnnnnnnnnnnnnnnnnnnnnnnnnnnnnnnnnnnnnnnnnnnnnnnnnnnnnnnnnnnnnnnnnnnnnnnnnnnnnnnnnnnnnnnnnnnnnnnnnnnnnnnnnnnnnnnnnnnnnnnnnnnnnnnnnnnnnnnnnnnnnnnnnnnnnnnnnnnnnnnnnnnnnnnnnnnnnnnnnnnnnnnnnnnnnnnnnnnnnnnnnnnnnnnnnnnnnnnnnnnnnnnnnnnnnnnnnnnnnnnnnnnnnnnnnnnnnnnnnnnnnnnnnnnnnnnnnnnnnnnnnnnnnnnnnnnnnnnnnnnnnnnnnnnnnnnnnnnnnnnnnnnnnnnnnnnnnnnnnnnnnnnnnnnnnnnnnnnnnnnnnnnnnnnnnnnnnnnnnnnnnnnnnnnnnnnnnnnnnnnnnnnnnnnnnnnnnnnnnnnnnnnnnnnnnnnnnnnnnnnnnnnnnnnnnnnnnnnnnnnnnnnnnnnnnnnnnnnnnnnnnnnnnnnnnnnnnnnnnnnnnnnnnnnnnnnnnnnnnnnnnnnnnnnnnnnnnnnnnnnnnnnnnnnnnnnnnnnnnnnnnnnnnnnnnnnnnnnnnnnnnnnnnnnnnnnnnnnnnnnnnnnnnnnnnnnnnnnnnnnnnnnnnnnnnnnnnnnnnnnnnnnnnnnnnnnnnnnnnnnnnnnnnnnnnnnnnnnnnnnnnnnnnnnnnnnnnnnnnnnnnnnnnnnnnnnnnnnnnnnnnnnnnnnnnnnnnnnnnnnnnnnnnnnnnnnnnnnnnnnnnnnnnnnnnnnnnnnnnnnnnnnnnnnnnnnnnnnnnnnnnnnnnnnnnnnnnnnnnnnnnnnnnnnnnnnnnnnnnnnnnnnnnnnnnnnnnnnnnnnnnnnnnnnnnnnnnnnnnnnnnnnnnnnnnnnnnnnnnnnnnnnnnnnnnnnnnnnnnnnnnnnnnnnnnnnnnnnnnnnnnnnnnnnnnnnnnnnnnnnnnnnnnnnnnnnnnnnnnnnnnnnnnnnnnnnnnnnnnnnnnnnnnnnnnnnnnnnnnnnnnnnnnnnnnnnnnnnnnnnnnnnnnnnnnnnnnnnnnnnnnnnnnnnnnnnnnnnnnnnnnnnnnnnnnnnnnnnnnnnnnnnnnnnnnnnnnnnnnnnnnnnnnnnnnnnnnnnnnnnnnnnnnnnnnnnnnnnnnnnnnnnnnnnnnnnnnnnnnnnnnnnnnnnnnnnnnnnnnnnnnnnnnnnnnnnnnnnnnnnnnnnnnnnnnnnnnnnnnnnnnnnnnnnnnnnnnnnnnnnnnnnnnnnnnnnnnnnnnnnnnnnnnnnnnnnnnnnnnnnnnnnnnnnnnnnnnnnnnnnnnnnnnnnnnnnnnnnnnnnnnnnnnnnnnnnnnnnnnnnnnnnnnnnnnnnnnnnnnnnnnnnnnnnnnnnnnnnnnnnnnnnnnnnnnnnnnnnnnnnnnnnnnnnnnnnnnnnnnnnnnnnnnnnnnnnnnnnnnnnnnnnnnnnnnnnnnnnnnnnnnnnnnnnnnnnnnnnnnnnnnnnnnnnnnnnnnnnnnnnnnnnnnnnnnnnnnnnnnnnnnnnnnnnnnnnnnnnnnnnnnnnnnnnnnnnnnnnnnnnnnnnnnnnnnnnnnnnnnnnnnnnnnnnnnnnnnnnnnnnnnnnnnnnnnnnnnnnnnnnnnnnnnnnnnnnnnnnnnnnnnnnnnnnnnnnnnnnnnnnnnnnnnnnnnnnnnnnnnnnnnnnnnnnnnnnnnnnnnnnnnnnnnnnnnnnnnnnnnnnnnnnnnnnnnnnnnnnnnnnnnnnnnnnnnnnnnnnnnnnnnnnnnnnnnnnnnnnnnnnnnnnnnnnnnnnnnnnnnnnnnnnnnnnnnnnnnnnnnnnnnnnnnnnnnnnnnnnnnnnnnnnnnnnnnnnnnnnnnnnnnnnnnnnnnnnnnnnnnnnnnnnnnnnnnnnnnnnnnnnnnnnnnnnnnnnnnnnnnnnnnnnnnnnnnnnnnnnnnnnnnnnnnnnnnnnnnnnnnnnnnnnnnnnnnnnnnnnnnnnnnnnnnnnnnnnnnnnnnnnnnnnnnnnnnnnnnnnnnnnnnnnnnnnnnnnnnnnnnnnnnnnnnnnnnnnnnnnnnnnnnnnnnnnnnnnnnnnnnnnnnnnnnnnnnnnnnnnnnnnnnnnnnnnnnnnnnnnnnnnnnnnnnnnnnnnnnnnnnnnnnnnnnnnnnnnnnnnnnnnnnnnnnnnnnnnnnnnnnnnnnnnnnnnnnnnnnnnnnnnnnnnnnnnnnnnnnnnnnnnnnnnnnnnnnnnnnnnnnnnnnnnnnnnnnnnnnnnnnnnnnnnnnnnnnnnnnnnnnnnnnnnnnnnnnnnnnnnnnnnnnnnnnnnnnnnnnnnnnnnnnnnnnnnnnnnnnnnnnnnnnnnnnnnnnnnnnnnnnnnnnnnnnnnnnnnnnnnnnnnnnnnnnnnnnnnnnnnnnnnnnnnnnnnnnnnnnnnnnnnnnnnnnnnnnnnnnnnnnnnnnnnnnnnnnnnnnnnnnnnnnnnnnnnnnnnnnnnnnnnnnnnnnnnnnnnnnnnnnnnnnnnnnnnnnnnnnnnnnnnnnnnnnnnnnnnnnnnnnnnnnnnnnnnnnnnnnnnnnnnnnnnnnnnnnnnnnnnnnnnnnnnnnnnnnnnnnnnnnnnnnnnnnnnnnnnnnnnnnnnnnnnnnnnnnnnnnnnnnnnnnnnnnnnnnnnnnnnnnnnnnnnnnnnnnnnnnnnnnnnnnnnnnnnnnnnnnnnnnnnnnnnnnnnnnnnnnnnnnnnnnnnnnnnnnnnnnnnnnnnnnnnnnnnnnnnnnnnnnnnnnnnnnnnnnnnnnnnnnnnnnnnnnnnnnnnnnnnnnnnnnnnnnnnnnnnnnnnnnnnnnnnnnnnnnnnnnnnnnnnnnnnnnnnnnnnnnnnnnnnnnnnnnnnnnnnnnnnnnnnnnnnnnnnnnnnnnnnnnnnnnnnnnnnnnnnnnnnnnnnnnnnnnnnnnnnnnnnnnnnnnnnnnnnnnnnnnnnnnnnnnnnnnnnnnnnnnnnnnnnnnnnnnnnnnnnnnnnnnnnnnnnnnnnnnnnnnnnnnnnnnnnnnnnnnnnnnnnnnnnnnnnnnnnnnnnnnnnnnnnnnnnnnnnnnnnnnnnnnnnnnnnnnnnnnnnnnnnnnnnnnnnnnnnnnnnnnnnnnnnnnnnnnnnnnnnnnnnnnnnnnnnnnnnnnnnnnnnnnnnnnnnnnnnnnnnnnnnnnnnnnnnnnnnnnnnnnnnnnnnnnnnnnnnnnnnnnnnnnnnnnnnnnnnnnnnnnnnnnnnnnnnnnnnnnnnnnnnnnnnnnnnnnnnnnnnnnnnnnnnnnnnnnnnnnnnnnnnnnnnnnnnnnnnnnnnnnnnnnnnnnnnnnnnnnnnnnnnnnnnnnnnnnnnnnnnnnnnnnnnnnnnnnnnnnnnnnnnnnnnnnnnnnnnnnnnnnnnnnnnnnnnnnnnnnnnnnnnnnnnnnnnnnnnnnnnnnnnnnnnnnnnnnnnnnnnnnnnnnnnnnnnnnnnnnnnnnnnnnnnnnnnnnnnnnnnnnnnnnnnnnnnnnnnnnnnnnnnnnnnnnnnnnnnnnnnnnnnnnnnnnnnnnnnnnnnnnnnnnnnnnnnnnnnnnnnnnnnnnnnnnnnnnnnnnnnnnnnnnnnnnnnnnnnnnnnnnnnnnnnnnnnnnnnnnnnnnnnnnnnnnnnnnnnnnnnnnnnnnnnnnnnnnnnnnnnnnnnnnnnnnnnnnnnnnnnnnnnnnnnnnnnnnnnnnnnnnnnnnnnnnnnnnnnnnnnnnnnnnnnnnnnnnnnnnnnnnnnnnnnnnnnnnnnnnnnnnnnnnnnnnnnnnnnnnnnnnnnnnnnnnnnnnnnnnnnnnnnnnnnnnnnnnnnnnnnnnnnnnnnnnnnnnnnnnnnnnnnnnnnnnnnnnnnnnnnnnnnnnnnnnnnnnnnnnnnnnnnnnnnnnnnnnnnnnnnnnnnnnnnnnnnnnnnnnnnnnnnnnnnnnnnnnnnnnnnnnnnnnnnnnnnnnnnnnnnnnnnnnnnnnnnnnnnnnnnnnnnnnnnnnnnnnnnnnnnnnnnnnnnnnnnnnnnnnnnnnnnnnnnnnnnnnnnnnnnnnnnnnnnnnnnnnnnnnnnnnnnnnnnnnnnnnnnnnnnnnnnnnnnnnnnnnnnnnnnnnnnnnnnnnnnnnnnnnnnnnnnnnnnnnnnnnnnnnnnnnnnnnnnnnnnnnnnnnnnnnnnnnnnnnnnnnnnnnnnnnnnnnnnnnnnnnnnnnnnnnnnnnnnnnnnnnnnnnnnnnnnnnnnnnnnnnnnnnnnnnnnnnnnnnnnnnnnnnnnnnnnnnnnnnnnnnnnnnnnnnnnnnnnnnnnnnnnnnnnnnnnnnnnnnnnnnnnnnnnnnnnnnnnnnnnnnnnnnnnnnnnnnnnnnnnnnnnnnnnnnnnnnnnnnnnnnnnnnnnnnnnnnnnnnnnnnnnnnnnnnnnnnnnnnnnnnnnnnnnnnnnnnnnnnnnnnnnnnnnnnnnnnnnnnnnnnnnnnnnnnnnnnnnnnnnnnnnnnnnnnnnnnnnnnnnnnnnnnnnnnnnnnnnnnnnnnnnnnnnnnnnnnnnnnnnnnnnnnnnnnnnnnnnnnnnnnnnnnnnnnnnnnnnnnnnnnnnnnnnnnnnnnnnnnnnnnnnnnnnnnnnnnnnnnnnnnnnnnnnnnnnnnnnnnnnnnnnnnnnnnnnnnnnnnnnnnnnnnnnnnnnnnnnnnnnnnnnnnnnnnnnnnnnnnnnnnnnnnnnnnnnnnnnnnnnnnnnnnnnnnnnnnnnnnnnnnnnnnnnnnnnnnnnnnnnnnnnnnnnnnnnnnnnnnnnnnnnnnnnnnnnnnnnnnnnnnnnncaaaaactaaacaggcacggtggcacatgcctgtagtcccaactactcgggtagactgagcaggtgggaggattgcttgagccagagaggtcgaggctgcaatgagccatgatcgtgccactgcactccagcccgggcagcagagccagaccttgtctcaaaaaaaaatgctatgctgtatgctttattatattaatatccaataccataaaggcaaatgccttctatatagagagaactagattaataatggtgagataacatagttaaattctcgtttagcaggagaaataaaaacatagactataggctaggcacagtggctcatgcctgtactcccagcacattgggaggctgaggtgggcagatcacttgaggtcaggagttcgagaccagcctggccaacatggtgaaaccccatctctactaaaaatacaaaagttagccgagtttggtggcgcatgcctgtaatcccagctactcaggaggctgaggcaggaaaatcgcttgaacctgggaggcgggggttgcagtgagctgagatcacgccactgcactccagcgtggggaacagagtgaggatctgttaaaacaaacaaacaaacaaaaaaaaaacacatggactctaataatacatggatacatttagtgaaataaggttaactgagtagagcagcactcataacattttaaaactataagaacatgtctgtacattagcaaatattagatgagaataatattgtcaatatttacttctggtaatttgaaattaaaaaacaaaactgttagcaaaatttacaataaagtataattattagaaaccaggctgggcacggtggctcacgcttataatcccagcactttgaaaggccgaggcaggcggattgtttgaggccaggagttcaagactagcctgcccaacatggccaaaccccatctctactaaaaatacaaaaataaaccagacatggtggtgcatgcctgtgatcccagctactcgggaggttgaggtgggaggattgcttgacctgggaagtagaggttgcagttagccatgattgtgccactgcactccagcctgggtgacagcaagactctgtcccaaggttttgttttggttaacttgctgtctcttttccaggaattccttgtgggctacccccaaccatcgccaatggagatttcattagcaccaacagagagaattttcactatggatcagtggtgacctaccgctgcaatcttggaagcagagggagaaaggtgtttgagcttgtgggtgagccctccatatactgcaccagcaatgacgatcaagtgggcatctggagcggccccgcccctcagtgcattatacctaacaaatgcacgcctccaaatgtggaaaatggaatattggtatctgacaacagaagcttattttccttaaatgaagttgtggagtttaggtgtcagcctggctttgtcatgaaaggaccccgccgtgtgaagtgccaggccctgaacaaatgggagccagagttaccaagctgctccaggggtgagtctgactgatgcctagaagggccctgccagtgacatgtgttgctgttggatcaggagatgagtatttgttaagggggaggtatgtatggtgaggagggtgggaaagtaagttttgggggaagaagcatgaaattaagaattgggggtgtgcatgcacccatgcatatgtgtcttcatttggaaagcaagaccttaattagccaagaaaaaagctattttggactcacctattatttgattctcagggcaaagtaccagctgcaatctctctcaagtatattgaaaaattatatggactttctctatgatcagctatgtgctaagcactttatatgcattttctcattcattatttacaacaacactttgaaattgtgctattgtattatccatttaatagtgacatcagcttgatctttcagaggttaaataaattagctaagtcacatgttctaagcgagacacccaggattttaaaatgcaagtgtatcagaccccagagtctgaatgttttggctcttgccatactttcatcagtatccattgctgaaagaaagagactggcttacaaagacagaaatcatagcctcagaatagacaaagaccttagagtttgtctataatggtctgcctcctacattttattttgattttattttatttaaaaactatttattagagttgacgtcccactctgttgcccaggctgaagtacagtgatacaatcatggctcactgcagcctcagattcctaggctcaagccatccacgtcctacattttatccctaggagtctaagtcaagagtgaaagtaacttgttcaaagtcagttaaatatttctaaattcatgtttaatgaggtatagattaggttgatgttaaaatgggttctgatgccctaagcatgaacgaacaggactataaataaaggcagatgttgagtcaaatactctccaaataatatgccctctcgtgacaaaggactgtcttatttaagggcttgtgtttttgatggctcatcttgtctactgatgccacaatagctggcttagcagctgtgtaggaggtgttatggttgatacatagggacagagaaggagcttacgattcttctaccaacccatgttagccttgtgcaaccactgagctgggaagatgaacagataaagggatataaagacggatgtactgaggcaggagatgggcagggcttgtgttctggtcacaatcctgctgaccaaaacaggctctggcccagacaggatgaagtgaaaaaacagcaggaaccagcagatggcgatgaaagcaattgctagctgccctcatagtcccatcagcaccatgacagtttacaaatgccatggcaacgacctagaagttaccgcccctttcctggaaagttctaaataactcgcccctcaatctgcattgatccactccttaatttacatgtaactgaaatgggtttacagcagtataaacacagttgcctgccaggaacccttatgttgctgactctgggtgtgctgcctgtgagttagccctgctctgcaagaagcagtgcctttcactaacagattgctgtctagcaccactggctcatccttgaattctgtcctggatgaggcaagaacccttccagagtaagccccaatttaggggcatgcctgtcccgaaacagtatgactgtactttagtcattggtgtgcaatcagagaaatcgggggaaatctgtaaaacagatttggtctcaggtgacagtctcattacctgaataacaatggtacaaatcgggattaccttcctaggaaatatgtagatggagaatccaccaatactgataacttcacattggatagccagagctaggagaaaatacctcatgccctgtagatttacaagtgaatttggggccttgtgctagggagaattgggttctatttctctacctctgactagctatgaggtcttcaggaagcataggaaattcccccataactaacaagtactctggaactgtcctttccacagtgtgtcagccgcctccagaaatcctgcatggtgagcataccccaagccatcaggacaacttttcacctgggcaggaagtgttctacagctgtgagcctggctatgacctcagaggggctgcgtctctgcactgcacaccccagggagactggagccctgaagccccgagatgtgcaggtgcctcaactctctggcttccagatttctctctttaccccacacatggaggtcttactcctattttttcttttttttttttttcttcttctagtgaaatcctgtgatgacttcttgggtcaactccctcatggccgtgtgctatttccacttaatctccagcttggggcaaaggtgtcctttgtctgtgatgaagggtaagtgtgacccagaattcagatcagggactcagcactgcagagtgactcttgagcttaaggatcaatccaaaaagagggctgacctaggagaagaagaatccagggagattaacctctggaagtgtagctttaaaataaaggtagggactaagtggcactactatcaggagataaagagataaagaaaaaatggcgcatataactgagtgtcaagtacaaacagaaatacagtcaccagtccagaaaaggggaccaacctggtggaaaagaagtactagaggagactaatatctgaaacaatgattggaaagtgtggtatgaaccagctggatccatgaacagaagtttaaaaagcaaaaagctcaactcatttgatttctcacttatagaggctcagaagtaaaatcattttggaaaacgtgcagcttccagtaaggcacaaaggaaaaacaatggccgaaatacaaaagatcttgaaaaaaaaagtgtgtatatatatgtatacatacgtatacatatggacacgtatatgtatacgtatacatgtacatgtgtatacatatgtgtatacatggacacgtatatgtagacgtatacatatggacacgtatatgtagacgtatacatatggacacgtatatgtagacgtatacatatggacacgtatatgtatacgtatacatatggacacgtatatgtatacgtatacatgtacatgtgtatatgtatacgtatacatgtccatatgtatacgtatatgtatacatatgtatatatacatatgtatatacatatatatggaacatatgtatatatacatatgtatatacatatatacatggaacattagatgtatgaataaataataatttgcagacatgaagagataaataaatattctaggggttgttaagaaaagtttgatatataagagaaagttgtatataagataaaataacatgcaaagattatttcacaaaacttttaatcaaataaatagtggaatttggaataggaacgaaagagtaagtagaaatattctaaattccaattacatgtgattgacagctctgccagctattattgctttgtcctcactgaaagctacactttttccaaaatgatttggcttctgagcccgtcaatgagaaactaagtgagttgagtgttttcacctgtgctttagcttgagcagtaaaatgttaattaacttaggaattctcagggaggaggttgagatctgtcacgaagggaagagagaaatggtgcattcatccagccactactgctttgttctttaggtttcgcttaaagggcagttccgttagtcattgtgtcttggttggaatgagaagcctttggaataacagtgttcctgtgtgtgaacgtgagtagatggaatacttgttcagtctggatctttctgtttttttcttaatatagtttgccccatgggattatctattgtttgtcccgctgtttgtgcccgcttttgatagaaattgttctttgttggaatagatacaagcaatgttttggggaaaaataaacatgagaatcatgtgttttgggtaccatcctataaatatttatgaggagagtctgtgctataaatagagagaaatgcttcatagaaataaatgtatggcaagatgctaggctaaatttttctcttctttcctgtcaaaagtaatagtcatacttcaacttttcagttcttccctcaatcatccatttagtcatatactcattctttcaacagaaaattatttgagcacctactatgtgccaagcaatcttctgggaactggggatatacctataaacaagacagataagtccatgtttaagtttttgtgcaaggataaagacaaaaatcaaagacatgaatagaaatgttcaaatgatactaagtgttattaagaaaatgctcttaattgagtcagtgctgtcaattgagaatgtagctgaggacccaaaaggcaagtgtagcccagcaaacctctgggtgtagctgagggttcaaaatgggaggctgttgcagcaatctaatcagagatgttggcccaggatagcaattgggaaaggtgatgatgagaagtgatcaaattctggatatattttgaaggtgcagatgacaggatttggtgatggttagcttagatagagggtgtgaaagaaagagaagaaacatagccagtttccaggtttttggccagagcaaccgccagggtagaatttcccttagctgaaatgcaggggactgcatgaagtttgggaatgggggaaatcaaaagttaagcttgggacataactttagtgttcctcttagatatccagatggatatgttggagagtcccaggctgcccatagatatgtagaagccatcattgtatctgctatgcttgaaatcaggactgaaagagatcttcacctagggagtgagtgctgctagagaacagatgcatggactgagcctggatgtccaggattaagagttgcaaaggtgagaaggaatcagcaaaggggattatgatgaagcagccactgcagtaagagaaaacacaggagggtgaggtgccctggaagccaagtatggaaattattttaagggattagactaatcaactgtgtcaaattctatagagaggtcaaattaggtgagaacagaaaattgatctttgggtttagcaacttggaggtaacaagtggaagtttcagtggagtgctggcaaacactgattggaatgaattctagggagaatgaatgggaggaactgtaacagatcatagacaatattttagaggagttttcatgtaaagagagtagaaataggactatagctgaagagggaaatgacagcaagaggtttgcttttgatttttaagagggcagaaaatagtgtgttaaaaacagaaacactactatgtcccatctatccatttacttcttcactaaatcaatcagggtattgcttccccttctgatcatagctattaaaaatacatgtttacaatagaattttgctcatatgaatactttgccttaaatcatttcaatgtcttgtattgatttatatgatgaaaatgataatttcatcttacattgttggaagtcagctatttgacaatcttaacttccctggaatagttaagaagtatgaaagaaaagaaaaagaaaataccctcatgaacccaacatatacctgaaatcgcttactagagtgtaaacattggttaagctattttaacctttgattagtttatctataattcttttaagctgtaatatcctcttcccaaattcaaagcaaattagaaaagggaaggagtgtccccaaatagaggcattccaaggaataaatgtgtttctttaatgaaaaaaataaataaataaacccttaaaaaccaatgagtatctcaaaaaaccgtaacattcttgagccttttgaaacacatacaggagtacatagcatttttttttcattgtgacagcattactgcaatctttcatctgtattttgaaaatcatagcctggcatcatcaagaaaaattaaatcactgatatacaaataataaatgtataatatattttagaaagatgtctctaggatgaagactcttgatgtcaaagatcatatttatcctgtgctttaaacagtacttgacatacagcagatattcaaaaacatgcttgttgaattaatggatgattcccctttaatgtgactgtgaagatttttatttactttaaaggaatatactctttattattcagaaatattaactatctgaaaaatttaggatgcttaatttgggaaaggcttttgtaataaacattgatttagttgtcatttcatttagctccatcttagcagaggcctaatacatttattttgcagtttctactttccttaagaagaaaagtacgcttaattggcaacacagtcacagtatgacaactgtagaatcgccttggattatactttaaaattttttatggaattgagagctcttgttttctttctagatatcttttgtccaaatcctccagctatccttaatgggagacacacaggaactccctctggagatattccctatggaaaagaaatatcttacacatgtgacccccacccagacagagggatgaccttcaacctcattggggagagcaccatccgctgcacaagtgaccctcatgggaatggggtttggagcagccctgcccctcgctgtgaactttctgttcgtgctggtcagtatccgcttccacatatcctaaatgggttcagaatatgtggacccaatccctcatgtttctgtaataagactatggtatttgtttgtgagcttaactttgtcataagtgtaaatgtcaaaattacataccatagctaaaacagatgggtttcagcagcgccaaggtatgtttgaatctataagatgaaaactcttcttgctggtggagtggaagagggtgggaaaaagggactgagggaggggtggagggaaggcagtaaggcacagttatgtaaatcaggaagaaaaatgtattcactggagacgacatgaaaacaactgcctctgaacactaaccagtatctgtataattgacagtctccataagttcatgaggggtacatgggcatgcaaagttcaaaattggaaatgtggatattatttagctaaggttttaaactagtgttctgctgcatgggctaagtaaccaaaaagactctctttgtcttgacttaaagtttgtccacttgtcatcttgcctccaggctgtcttaatctttgtacttgaactgttccactcagggggtaagaagcaaggaaagagtagcccaaagaaaagagtaggaaaaggaagaggctatttcttcctaaggaggggaagaagttgcctggtccttcagggcaaacattaggccttttccagagcagaaactggagtagattagggatgtggcaccagccttggaatattccattatccacagggaagccctgagagacaagagccagccaaggtgaaaagactaaacctgatgaaaggcatttaacctttctttgacctttactctccaactgagtggtacccatcagaatgcagtaaatttttttaatgtaaatgcctagaccccagtgcaggcttaatgaacagatggaggaagccttctccaaaaaggaggtaatggagttcagactctatttgaaaatatgcagcacatggctgggcacagtagctcacacctataatcccagcactttggaggccgaggtgagaggattgtttgaggccaggagttcaagaccaacctggccaacacagcaagctcctaactctacaaaaaataagactgaaaaattgtaaaaactgtaaaacaaaaaaagtaaaaatatgcagcacacaatatactctctcagaaagaagacatagcttcttacagaaggctgatggcttagtctgttttgttctggttctttttttgttttgttttgtgtgtgtgtgtgtgtgtgtgtgctttttttgagagagagggtcttactcttttgcccaggtggagtagagtggtgcaatcatagtttactgcagccttgacctccctggctcaagcaagcctcccatctcagcctgccaagtaggtgggaccacaggtgcatgccaccacacccagctaattcttgtattttatgtagaccggttttcatcatgttgcccaggctggtcttgaactcctgggctaaagcaatccacctgccttggcctcccaaagtgctgggactacaaggcgtgagccaccatgcccagcctattttgttctatctttaaatgcctggtttagcatcagaagaaaaacactgtattagtttcctagggctgctgtaacaaattaccacaaactaggtggcttaaaacaaaagaaacttattatttcacagttttgtaggctgaaattgagatgttggcagaggtattttcccatcttctaaggctctggaaaataaccaattctttacttcttccatctgctgctggttcctgggattccttggcattccttggtttgtggatgcatcattcaaatccctgcctccatcatagccttttcccctgtgtctctatatgtcaaatccctccactttttccctgatagggacaccagtcattggatttagggcccactctaaataaaagatgatctaatctcaagaacctaatcttaattctatctgaaaaaccattattccaaataagtttctattctgaggttttaggtagagatatcttttgggagaacatcattcaactcactacaaggggtacctgctatgaaaggccagagaggcagcttatgatgggcaccctgagaatggagtatggagagagatgataaaatatgtcttgctactcaggagtgaattagcacaaacacatgaagatttgagtggttaactgaggatataggcactccgataggaggtcagaatgtgaaactacaagctgaagttcttgctttggtgaaataagggaagaaagatcagaaagctgagtggtcttccaaatagtaaaaaaaatcctgctgagtagatgcattgaagagcttcatcccaaggtaacatcaaggagaagaaaatcttttgctattcttgtaagtctctttgtttctgtgatccacctatcagcttaattgaagagaaagaggaggtagggtggaagtctctctgctaactttgatattcctgtggtttttctctccaggtcactgtaaaaccccagagcagtttccatttgccagtcctacgatcccaattaatgactttgagtttccagtcgggacatctttgaattatgaatgccgtcctgggtattttgggaaaatgttctctatctcctgcctagaaaacttggtctggtcaagtgttgaagacaactgtagacgtgagtaacccctccctgggaactacttcatgtctgttaaagcataggtgggaccgggcttggtggctcacgcctgtaatcccatcactttgggaggccaaggctggcagatagcttgaactcaggagttcgcaaccagcctgggcaacatggccaaaccccacgtctacaaacaacaacaacaaaaacaacgtaggtgggatttgattcaatttgctcaaattttggaagcaagatgtctatatttgcccaagatattttgataaaggaaaggatggtcttgtacatcaccccttcttcttgcttgtagttcctgaaccttgactagatgctcatttcatgagaatggctctcacaaaagaattagagagaaaatttacattcactgtagatcatccttgatggctgacaccattaaatgaatgaaacaggggtacaaaagaaatttatgtgagttgcagtgaactgtgcttggctaactaaaaataggggagacatcccaaattttgaggcctttgattttggctggcggaatgagagtacaacactttagccataaatgacttgttttgtttttgttttgtttctgctgttgctgttgtgttttttgtttgtttgtttgtttgtttctgagatggagccttactctgtcacccaggccggagtgtagtggcgcgatcttggctgcaacctcctgggttcgagcaagtctccctgcctcagcctctcgagtaactgggattacaggcacccactcccatgcccagctaatttttgtattttttagtagagatggggttttgccacgttggccaggctggtcttgaactcctgacctcaggtgatctgccggcctcggcctcccaaagtgctaggattacaggcgagagcccatacataacctttattaggaggtgcaagatagtctttttcaaagttgtgttcgtagctacatgattctgaagttgtctgccaagtttcctcaaagcagtcaattccatgaaacaattggaactgtatatgctgtttagtatgccacactccagtctgaaccttacaaaggtaagttgaactctatatttaatcccaaattctgcttcttcccctaggaaaatcatgtggacctccaccagaacccttcaatggaatggtgcatataaacacagatacacagtttggatcaacagttaattattcttgtaatgaagggtgagttgagaataccatctcttgaatatgagttccagaacagcagagccaacttctgacccagtctcagatagacaaactaaactattgctccctttactttaaaagcaagcaataggacttatagatggagatgatacgttggacatagccatatgatcaaaggaatacaaaaaagaaggtacaatatgtattgtattgtaaaccagaggagggcaacatgttcctgtcaaaggtgatacatgtgaaacctggtcaggcattcattggatgaaaaggagcagcttacaaataaggaaaaggaaaaaaggtagttgaaccatgtaaacctccttaactgagatcagtaggtaatacagttgagttggaggaccctgaagcagagtttgggagggtaaacattaattgtaacagcagctctggaagagtatgcatcaaagtgcacacagagaggagacattatggggttcttgctcttgacttctccttgggacaagtagccacaccaaaagccattgcctcaactgagaaggggcttttaaaaactctggagtggacctccatcaaactccagcagacctgcagcagaggggcctgactgttagaagataaactaacaaacataaaggaatagcatcaacattaacaaaaaggacgtccacatgaaaaccccatccaaaggtcaccaacatcaaagaccaatgatagataaatccacgaagatgaggaaaaaccagcacaaaaaggctgaaaattcccgaaaccagaatgcctcttctcctccaaaggatcacaactccttgccagcaagagaacaaaactgggtggagaatgagtgagttggacagattgacagaagtaggcttcagaaggtgggtaataacaaactcctctgagctaaaggagcatgttctaacccaatgcaaggaagcgaagaaccttgaaaaacaggttagaggaattactaactagaataaccagtttagaaaagaacataaatgacctgatggagctgaaaaacacagcacaagaacttcatgaagcatacacaagtatcaatagccgaatcgatcaagtgaaacaaaggatatcagagattgaagatcaacttaatgaaataaagcatgaagacaaaaaaagaatgaaaaggaatgaacaaagcctccaagaaatatgggactatgtgaaaagaccaaacctacgtttgattggtgtacctgaaagtgacggggagaatggaaccaagttggaaaacactcttcaagatattatccaggagaactgccccaacctagcaagacagtccagcattcaaattcaggaaatacagagaacaccacaaagatactccttgagaagagcaaccccaagacacgtaattgtcagattcaccaaggttgaaatgaaggaaaaaaatgttaagggcagccagagagaaaggtcgggttacctacaaagggaagcccatcagactaacagtgaatctctctgcagaaaccctacaagccagaagagagtgggggccaatattcaacattcttaaagaaaagaattttcaacccagaatttcatatctagccaaactaagcttcataagtgaaggagaaataaaatcctttacagacaagcaaatgctgagggattttgtcaccaccagacttgccttacaagggctcctgaaggaagcactaaacatggaaaggaataactggtaccagccactgcaaaaacataccaaattgtaaagaccatcaacaatatgaagaaaccacatcaactaatgggcaaaataacaaatcagcatcataatgacaggatcaaatttacacataacaattctaacattaaatgtaaattggctaaatgcccccagttaaaagacactgactggcaaattggataaagagtcaagacccattggtgtgctgtattcaggagacccatctcatgtgcaaagacacacataggcgcaaaataaagggatggaggaatatttaccaagcaaatggaaagcaaataaaagcaggggttacagtcctagtctctgataaaacatactttaaaccaacgaagatcaaaagagacaagagcattacataatggcaaaggatgcaacaagaagagctaactatcctaaatatatatgcacccaatacaggagcacccagattcataaagcaagttctgaaagatctataaagagacttagattcccacacaataatagtgggagactttaacaccccactgtcagtattagacaggtcaacgagacagaaaattaacaaggatattcaggacctgaactcagctctggaccaagcagacctaatagacatctatagaactctccaccccaaatcagcagaatatacattcttctcagcaccacatagcaattattctaaaattgaccacataattggaagtaaagcactcctcaaaatgcaaaagaatggaaatcataacaaacagtctctcagaccacagtacaatcaaattagaactcaggattaagaaactctctcaaaactgcacaactacatggaaactgaacagcctgctctgaatgactactgggtaaataacgaaatgaaagcagaaataagtaagttctttgaaaccgatgaaaacaaagacacaatgtaccagaatctctgggacacagccaaagagtgtttagagcactaaatttatagcactaaatgcccacaggagaaagcagaaaagatctaaaatcgacgccctgacatcgcaattaaagaactagagaagcaagagcaaacaaattcaaaagctagcagaagagaagaaataactaagatcagagcagaactgaaggagatagagaaacaaaaaacccttcaaaaaatcaatgaatccaggagctggttttttgaaaagattaacaaaatagaccactagccagactaataaagaaaaagagagaagaatcaaatagacacaataaaaaatgataaaggggatatcaccactgatcccacagaaatacaaactaccatcagagaatactataaacacctctacgcaaataaactagaaaatctagaagaaatggataaattcctggatacatacaacctcccaagactaaaacaggaagaagtcgaatccctgaataggccaaaaacaagttctgaaattgaggaagtaattaatagcctaccaaccaaaaaaagcccaggaacagatggattcatagctgaatcctaccagaggtacaaagaggagctggtaccattccttctaaactattccaaacaatagaaaaagagggactcctccctaactcattttatgaggccagcatcatcctgataccaaaacctggcagagacacaataaaaaaggaaaatttcaggccaatatccctgatgaacattgatgcaaaaatcctcaataaaatactggcaaacgaaattcagcagcacatcaaaaagcttatccacaacgatcaagctggcttcatccctgagatacaaggctggttcaacatacgcaaatcaataaacgtaatccatcacattaacagaaccaatgataaaaaccacatgattatctcaatagatgcagacaagggcttcgataaaattcaacagcccttcatgctaaaaactctcaataaactaggtattgatggaatatgtcccaaaataataggagctatttataacaaacccaccactaatatcatactgaatgggcaaaagctggaagcatgcgctttgaaaaccagcacaagacaaggatgccctctctcaccactcctattcaacatagtattggaagctctggccagggcaatcaggcaagagaaaggaataaagggtattcaaataggaagagaggaagtcaaattgtctctgtttgcatatgacatgactgtatatttagaaaaccccattatctcagcttaaaatatccgtaatctgataagcaacttcagcaaagtctcaggatacaaaatcaatgcaaaaatcacaagcattcctatacaccaataatagacaaacagagagccaaatcatgagtgaactcccattctaaattcctgcaaagtgaataaactaccttggaatacaacttacaagggaagtgaaggacatcttcaaggagaactacaaaccactgctcaaggaagtaagcgaggacacaaacaaatgaaaaaaacatttcacgattgtggataggaagaatcaatatcatgaaaatggccatactgcccaaggtaatttatacagtcaatgctatccccatcaaattaccaatggctttcttcacagaattacaaaaaaaaaaaaaaaaaaactactttaaacttcatatggaaccaaaaaatagcccatatagccaagacaatcctaagcaaaaagaacaaagctggaggcaccacgctacatgacttcaaactatactataaggctacagtaagcaaaacagcatcgtactggtaccaaaacagatatatagaccaatggaacagaacagaggcctcagaaataatgccacacatctacaaccatctgatctttgatgaacctgacaaaaacaagcaatggggaaaggattccctatttaataaatggtgttgggaaaactggctagccagatgcagaaaactgaagctggaccccttcctttacaccttatacaaaaactaactcaagatgtattaaagacttaaatgtaagacctaaaactataaaaaccctagaagaaaacctaggcaataccattcaggacataggcatgggcaaagacttcattactaaaacaccaaaagcaatggtaacaaaaaccaaaattgacaaatgggatctaatgaaactaaagagcttctgcacagcaagagaaactatcatcagagtgaacagacaacctacagaatgggagaaaatttttgcaatccatccatatgacaaaggactaatatccagaatctacaagggaacttaaacaaatttacaagaaaaaacaaccctatcgaaaagagggcaaaggatatgaacagacatttctcaaaagaagacatttatgcagccaacaaacatgaaaaaaagctcatcatcactggtcattagagaaatgcaaatcaaaaccacattgagataccatcttgggccagttagaatggcaatcactaaaaagtcaggaaacaacagatgctggagaggatgtggagaaatagaaatgcttttacactgttggtgggagtgtaaattcgttcaaccattgtggatgacagtgtggtgattcctcaaggatctagaaccagaaataccatttgacccagcaatcccattactgagtatatacccaaaggattataaatcatccttctataaagacacatgcacacgtatgtttattgcagcactgttcacaatagcaaagacttggaaccaacccaaatgcccatcaatgatagactggataaagaaaatgtggcacatatacaccatggaatactatgcagccataaaaaaggatgagttcatgtcctttgcagggacatttatgaagctagaaaccatcattctcagcaaactaacacaagaacagaaaaccaaccaccgcatgttctcattcctaagtgggagttgaacaatgagaacacatggacacaccgaggggaacatcacacagtggggcccgtcagagggtaggagtccaggggagggatagcattaggagaaatagccaatgtagatgatgggttgatggtgcagcaaaccaccatgacatgtgtatacctatgtaacaaacctgcacgtcctgcacatgtatcccagaatttaaagtatgataataaaaaaaagactgtgtactcatttttggttgccatgataaattcagagaggaaaaacatgatatatattaaattttactgcaacaactaactgccccttgtcatcagcctattctgtcactagagtgagtcagtattcctcttttctgactgtctgagcctggacgatttaaactgcttttcacacaacctcttgcccaaccttttctcacctcccattgtgaatgaacatagatttccctatggtaaacaaaacaaaatatcaccaaatctaaggcaagataaagaaattgaagataaaagaaaccaacccaagagatcagagaaatattcatctgcacaacagcttcctccaataaacaggggacaatctttaaaaatctctcatatgtgtttgtaacatagaatcgatggaactatatgaggcatttataagatttaatgatctgatatcagaaaagttgagatttgaatgaaacacatgggagtcggaaaaggagtgatgactggtagattggagcctgcccccaacccccggaaaaaaaaaaaaaaaacaccaaagggataatgaagacaagattgaattctccagaattcatcaaggaccagacttgaaatgacacatatatacacacaaacacactacacacaaacacacagggatataatatagaaattccagaaaaaataaaagaaagcagaatgaatagaagcattaattagcacataatggaagacaatttctcaggctataaagaaaaatactaagttgatccttgaaggcttactagacaaatcaagattaacaacaatgggccccggccctacatggaagaaaattatgccatccaaatataaaaaaatactgccactctccagaaataacaaaaaagaagaaattcatcttagcaccaagcttccgttctgtaacactaagtagtagaagttagtgtttgagaggaaatattgtacaataaaatttctgtactcggccaagctgccattcatctgcaaggcacagatgcatcgtcttaaataagaaggaaccccaaacatacaccagttagatatactgcctacaaaaagaaaaactcccacaaagctgtgggagtttttctttttgaagaagaaatcaaaattccaaatggtgttgtatcaaagaaatattaatgaggcacaaaactagttaaatggggtcactaaaactgttttatttaatatggaaataaaatatcaaagcaggactaattcttgaaagataattcatgtaatatgaaaagaagaagaaacttgatataaaaaatagattttatcacttcagctaggaagttagagatgaagtaagaaaaaccatcataaacttatcatatgtaggggacacatattcttgacataaaaaataaggagaaaatggtacttcacaccagtataaaatctatatatctatatctatatatatctatatctatatctatatatatatatataatcaaattttaaaagataatcagaagggcgaaaccacttggtccataaaacaaaagaggggtgagagaaacaagagctagcaagctttctgtctctcttttgggaaactagcattattacgttaaagtgaattaatacatgtattttaatgcctcagtttttctttctaatataataaatattaacagatataaactccattggtaaaatcactttgaggtccttaatacttcttaaagtggccgggcgctgtggctcatgcctgtaatcccagcactttgggaggctgaggcgggcagaacacctgaggtcgggagttcaagaccagcctggccaacatggagaaaccctgtctctactaaaaaatacaaaattagccaggtgtggtggcgcatgcctgtaatcccagctactcgggaggctgaggcaggagaatcacttgaacccgggaggcggaggttgcagtgagccgagatggtgccactgcaccccagcctgggcaacaagagcgaaactctgtctcaaaaaataataataataataataacaataacaataacaaaaatgtttaagagtgaaaagaattcttgagaccaaaaaagtttaagaactagggcttgatgatgttcaagcaaagataggaaaaggctattgcaagtacggtacaaagcacagggggaaggtttcataagtatatatataatatatatataatataacataaaattcatatatattataaaaataataaatatgatataaatttgatataaaatattatataaatctgatttttaacatattttgattttatactggtgtaaagtactattttctctttattttttacatcaagaatatgtatcccctacatagtataagtttatcatagtttttcttacttcattcctaacttcctagttgtagtgataaaatctattattttatatcaataaaaatattgatataaattttatttacatgatatacaatatttaaatataacatattttatattacaaaatatactactatgtattacaaaaaaaaaaacaaactccatttagcagagcaagaatggagtttgttttgtacagtgctgagttccaacccatagaattgttaaataaataaaaaggaaagaacactataagatcaaactcatcagttataatagtaaatgtgaatgattccaatccccccttttgaaagacaaaggcttctaaatatggtcagaatcctatttacagtagcatcaaaaagaataaaatacttaggaatcaatttaatcaaggaggcacaagacctgtgcactgaaaactcagtaactgaaaatgagcaaatgatgtgatagacatgtctccaagggaaatatacaaatgcccaataaacacatcaaaagatgttcaacatcattagtcattagggaagtgcaagtcaacctgactttgtactaggatgttttgtattaggatggttataatatttttaaaaaataggaaataaaaggtgttggcgaggatgtggagaaattagaacgcttatacattgctggtggaaatgtaaaatggtgtagcactgtggaaaacagtttgatgattcctgaaaaagttaaacatagaattaccatataaccagcaattctgctcctaggcatatacctaaagaaattgaaaacaaggactgaagcagatgctcaaataccaatgtccgtagcagctttgttcaaaatagccaaaaggtagaaacaacccaagtatctacgagcagatgaatggataaatgaaatggagcttatccattccatggaatattcttcagctatacaaaggaatagagttctgatacatgctacaagatgcataaactttaaaaacattatgctaagtgaaatgagccagacacaaaaggataaatactgtattccacttttatgaggtgccaaaaataagaaaatttattggactaaaaatagattagagataaccagtggaaggagagaatagggagttacaactcaatacatccagtttctcattgggatggtgaaaatttttggaactaagcagtgataatggttgtataatgttgtgaatgtcattgatgccactgaattatacccttaaaatggttttaatggcaaattttatgttgtatctcttttaaaacaataagaaagaaaaaaatttttaaatatatcatgtgatattaggaaagaaaaaaacagataacagtataagaaaaataagaatttaaaacatatcaaataagatttaaaaattttgtttaagatattgatacttggtccagtgcacaataaagacaagaactttttttttttttcttttgagatggagtctcgctctgtcaccaggctggagtgcagtggcactatctcggttcactgcaacctccgcctccagggttcaagccattatcctgcctcagcctgccgagtagctgggactacaggcatgcgccaccacgctgagctcatttctgtatttatagtagagacagggtttcaccatgttggccaggatggtcttgatctcttgacctcgtgatctgcctgcctcggcctcccaaagtgctgggattacaggtgggagccaccgcgcctggcctgaagacaagaacttttgaacaagagagcgctaactaacgtattgaaatacataaaacaaatactgatatatagaagagctcattcagctgtttcaaagacagagctctgtaacacatgtactcttacctaaagaactgtctcccaccactggaaaggaggtcttctctgaccaaatacacagcatcttggagttggccagcattaacttggatcatctggctggccaggaaaggagtgctcagggagaaagaggatggtcaccatcccaaccagattggccattagatctatgtatcaacagagtgacatacgggagaattaaaattctagtatgcaaaaatacgccgtatgttaacagaaaatagactgcagggaaatttgtattaggtaaaaccgagagaaagttaagagcatacaacagtagataagcaatagacaacccgatataaaaatgaggaaagaatatgcacaggcaattcacaaaaggaaacataaaaatggccttaaaaattgctaaaataaatatttaagcaaaaaagctcaacttcactatggtttggggaaatgcaaattaaagcaacaatatgtcatgttttcacagtcacattaataaaagtttaaaagacggaagtagaggtaaataggaatttgaggaaaaggagccctctcatagtggttcattggaatgtgaattgctgcagctttcaaaaaaaaatcttacactatccacaaacaatgaaagcatagatatcttcttagctactaatcccactcctaggaaaaggagtattaattacaataggttctttattgcagtattgtttatataagcaaaaagagcaaacaaccttgacatccttctattagcagtaggttgaataaatcataagacgtctactatgaactattttgcagcaatcaagaagacttaattagatctctgtttagtgatttgaatgggtgaccatgttgtgatgtcaacagaaaaaaataatttgcagaaaagcatatagagtttgttctcaatttggaaaaataatgacaaatttggaggagatatcctatacacatatgtgtgtttgattgggtttggaaaaatcaggaccacctgagatggaggtgggagtgacaaaatatacatggtatactaagtgaatatataggttatacaattacgttgttaaatttctgaaaacaagtgcaacttaagcatataactaaggagtagatgttaacctggacaaatgaaacatagattgttttgagcaagagacggcaaaattttttgtcaagagccagatagcaaaattttcaattttgcagaccatgcaatctctattgcaattactcagttctgccattgcagtggaaaaatagccctagacaaatgaatgtgtgattgtattttgataaaacttcatttacaaatacgtgctatagaacaaatttggcctgtgagccatagggtgacaatctccggttagatgaagggattgagagcattatttttcttcaattcttgtcattatgcaaagtcagagaattttctaaaataaataaaaatacaaattggcaaaataataatagttgaaaacttcagattgggcaaataagtgaacaaataatcacatgttgaggaataaggctgctttgattcttgtgtgttcaactttgaaacctttatcacagttataaaaaccatttataaaagtgatataactccacagagtatacctcaataaatttgcacatagaagaaatcaaaatgggtatattttctcatcgcaatacaccaaaaactaggaattaataagcaaatgatacattaaaaattcaaagttttagaaaacggagtaccttagatcttgatcaaagagaaatttaaaaacagccattgcagattacctggagaataacaatcgctaacgatcctcaagtgcatgtgcctcaagcattcttctaagtcctttacttgaattgatttacttagtctttaaaagaccctttgaaatggatatcatgcatatccctcattgtatagaagagaaaactgagacagacaggttaactaatttgtccaaattcatgtgacaggttgaggttagaattagaatatcgccagtcagcttcaacaacctgtaatggtaagccttacattatttatcttcttaattaggaatgctgaaacatatattactcataaaaatttctggggtgctgatgccaaaactgtcctcagagaaatttttcaatcctttttgttacttgacaggaaaaaattcaaataaatgaacaaaacatttcttaacaatttttaaattattaaaaacatatataaaaggctgctggagtaaggaattaataaagtaatgaacaaagaaaaaatcatagaaattataaagaaatctaaaagcagattctttaaagtgaccaattataaaacaaacagactgggtcaattgtcatttcacaaaataacaattctataaatatacaagaatgagaaagaagacataagcctgttgatattgaagagatttaatacttgataaaaatattatatcttctctattctaataaaattaaaactatccatgaaatgtaccatgtcagaagaaaaatacaatttaccaggtgtagtttaaaataggcagaattgctgataaacccatatctgtttgagtccatattttcaattcttttaggtatatacccagaagtggaattcctgggggatatggtaattctgtttaacttttcaaagaattgccagactattttccacagctgctgtaccattttacatccccatcagcaatgcacaaatgttccaatttctctacatcctcaccaacacttgtcatttttctggtttaaaaaaaattattattataccaccctaaaaggggctgaagtcagtttgatttacattttcctaatgactaatgatgtggagcatcttttcttgtgtttattggccatttgtatgtcttttttggaaaaatgtctattctcatcctttgtccatttcgtaattgggttgtttgtttcattgttattgagttacaggagtcctttatatgttctaagtattaaatccttatcagatagggttttcacatattttctatcattctgtgggttgtctttttaatctcttggtggtatcttttgttcttgacttggactgcaggacacttcagttcctcactacatgggcttctccaaaggacagctggcctctcccagaatgagcatctcaaaaagagaagaaaacattgcagtgctttttgtggttagcctctgaagttgcacactatatcatttccactttattctaatcattagaatcaagtcacaaagcacagcccacattcaaaaagagaggaattgggctccatcacttgaagggacatgtataaaataatttgtggacatatttaaaaccaccacaaagaagcacctttaaaaaaagacaatggcccagttttgtaactcttttttaacttcaagaaatagataatccaagtattaatattatttaaactgttatggaacatagaaataaaattatagccataattaaagtttgccaaagattacaaatgaaaataaaataaaatatatctctggctcatttgctaatataaatactaaaaatcttaaattgactattaaataaaaccaatattaaaagaattatgcaaggggaacaagtaaggttattccagaaatggttccaaattaggaaacccacaaacttacaatattaaagagtacaacttttcttaaatgtcatataaatatactctctaatgccaaaaaacacaatgaatggttaaaatctaaaagcatgcttgaatataattaaagttcaaaggaaaagaacactcggcatccttcctattattcaaagtagttgtggaaattcaaaccagtaaaatgacagccccctgtatttagagagatatacatatagatatagatagagagagagagaaggcaaatttattattaactgatggttgtttacctgaaaacccgaaggaattatttgaaaggttattagaataggaaatggtagtgagatatcgagtaaaaaataaatacttataaattaattactttctttatgtaggtaacaaccaaatagaatataaggaggaaaaataccattcacaacagaaacaaaatcatctagaaagaaatttaacaggaaatatataggacttataagcagaagatttaaaagagggggacatagaaaaatacttcaagaaatggaagatataatattttatttaaaagatttaatgttgtggtgatgttaattatccctgaattagtatgcaaatttaatgtaatcagtttcaatgacattcttttttttaatttgacaagatgtctgtaaatgtcatgagacccaccaacagaatattctgagataataacaagaagggtgtttgataccagatcagaggtgggtttgatacccacctctcagtgtctggtaaccacctttctactctctacttctacgagttcaactattttagatttcacatgtaagaaagatcatgcggtattagttcttctgtccctagcttattttggaaggtattttaaggcacaaatatgttgtagtgtaattatgttgtaatttttcctgacctgatgtcccacgtctgtaaaattcttttattgaagcctaggctctttccctaggactccctgtctggaatcataaatatcttacttctgtacttaacagaattgttctgtctgcatatagtccccactttttctccaagtagtttctcaaacaaatgcacttcctttcctgaaaagatgagtaagattttaacagctttaaatctttatatatagatatattttaagccaaacgactacactgtacatggttttatagccctctttaatacttacgaactatattgtataattattctaattattatatattactctacaacaccatttttagtggttgcattttggttattacttggatagtccataacctacctaacaaagtccttaatgtctggaattaaagtggtttcgcatttcaactgttagcaaaaacactacaatgcacgatcctgcacacgtgaaaagaaatgagatgaggacttcactaacttcaaagacagcttaaggattcagatcttcacatgtacacaagagacaagatttgcagatttgagtgaaaggctatgcacgattttaagcctttcagtacatattgccaaagtgccctccactaaactttgaccatgacctacggagtgagtcacaacagtgactctttctttgagtttatattactgctaggttttgtcaatttgccaatctaatgggcaaaaacggcattttatttgcattttaaagtgtatttatcatgtttataaggaagctaaacttttcatatgttcatttgactatttccatttttcgtttgtaaattatttgttcataattctttaccatttttctacttgggtgtttgcctttttataattgatgtataagagttgtttttattatttttcctctgtggtttgtcttcaaatttgtatgtagaaaggtttatttgtaattattcagttttatcagttttgttcatagtagaatttttcctcaatgtatgtctatagaagcctcaaatcagaaacacgtttgcctaaatcacctagttcttttatggttttatttttgacatttaatctttgatacacacggattttgctttgatgaatgtcatgaggcagagatctagcttagcttttcagatatttgccctatcaatgaataattcagttttccgtgtcttgaaatgccatctttatcactgccaatttcttacaaaaacttgtatctatttcttgggctttcccccattttgctctagggatctgtgtctctattcctgcatcatttcaattattttacattttaaatgcattttaacatcccttctgtttttgtgccttaaaataccttccaaaataagctaggcacagaaaaactaatgccacatgatcttacttccatgtgaaatctaaaacagttgaactcatagaagtagagagtagaaaggtggttaccaggcactgagaggtggggagctgagatttggtcaaagggcgcagggtttcagttagacaggaggagtaagtttcagagatctattccacagcatggtgactatagttaataataatgtgtatttcaaaattgctggccgggcacagtgtctcatgcctatagctctttgggaggctgaggcatacgaattgcttaagcctagaagttagaaactaggctgggcaaaatggcaaaaccctgtctctaccaataaatacaaaaattagccaggcatggcagcgcatacctgtagtcccagctactcgggaggctaaggtgggagaatggtttgaacctgggaggcagaggttgcagtaagccaagatcacatcactgcactccagcctgggtgatagatccagaccctgtcaaaaaaaaaaaaaagaaagaaagaaaagaaaaagaaagggaaaaaaaattgctagaagagtagattttaaatattctcaccacacacacacacacacacacacacacacacacaaaacaaatatgagaggtgacggacatgttaattagcttaatttaatcatttgcaacagaaacatatatcaaaacaccacattttaccctataaatatatacaattattgtttgttcataaaaataaaatcagattttaaaaaatattcactgtgtttttttcagccatacataggctggaaccttcttcacattttggctccaacaatctagcttagtcacagcgagcacatctaaaacaacctctaggaggccaaaagtcagaggactcccatgatcctgtgctcttagacaacttttaaatgtatgataggagacaggcagaggaaaacacaggtaataatgggattatccttttctttcctttctccagtggttctcaacttgtttaattgcagcaatttttaagattttttttcttggcacacttgaaaagattgtataccatagcctaaacaggctagcaataagtaaaattcaatcagtacctaaaacgtaaaagagactcactgtgtctacaaaaacattgacggtcattgccatagtcacacagttccctttagctttctgtcactgtttcgggaagagctggtatatcagttaggatttccagctgtaaaagacagaagaaataaaataacaggatctcaaacatagatagtagtttacttctgtctcaggttaaaaatcacgaaagtaggcagtccagggtttatacgatgactccataatccacagaaacctgggttccttccactttgctactctgacctcttcaaaatgagagcccatcttatctcatggtctaaactccagccagtatagaggacacagggaagaagggaaggccaattcctttaaagacactttccagaagttgcacaagacactccacttacatcctctggccagaagttagtaacatggctatgcccggctgtaaggaaaggtgagaagtgaaacctttattgcaggtggccaatggcccagttaaaaatagagggttccattactaatgaaggagaggaaagtggatactagggatggcaccagtagtctttgctacaaatggttactgccctgatcacatttcttacataatcaagaggaaaagttcttaactgttgcagttactgcctcatcattatatggcattccattttaccctttaatttttacttggtcaagtttaggcctgctgtacaccagaacacatgaatagctttgctcagcattctttgtgacgttgctcacagtaacattatggatacctaataaattttttaaaagacaaaatgttctacgttttgtggcctactctggatggctttaaggtaaagtgggtgagtatccctaccctttacatttcaagtgtaggggtgtttagctgtctcttctggctctcatttactgactcttctgggtaaatccattgttctttcttttatacaagagactatctgagcacccaaaacttgaaagtctctaagctaggtgctatagtgttaaatatttcagtaagatattttccctgcttaatccaggagcttgtcatttccttgctggaagtacacatggataaaataactgcaaggtttctgaaagacttaagtacaaaaatgtcctgcaaagaaaaagggaaatatctcattcagttgtgagggattaggaataaaaatgaattggagaggtcaaaatgtaagcttgtcctcaaaaagaaaggactaatttgcagatggagatggggtttcttccttccgaggtctgccatggtgtaatctgtcctgtaatgtctaatgtctacctgctattattttctaaatggtgagttaaatgggaaatatgtgtagcgtataaccattttctatcctttgctttaggtttcgactcattggttccccatctactacttgtctcgtctcaggcaataatgtcacatgggataagaaggcacctatttgtgagagtaagttgaaatacttttctccacaaattcctctgtgtgatcctgacttgcccctggagtacaaagaataaattgaatccttcttgcacaaagtagtctctcagatatttgaaaataggagtcagatgcttcatggtcttcctggcttttctttatcttaaaaggtgatttatctgaaactgtgggcttgaacctaggcaaaataccctactttcccattataatagtaaatatttccagtatagagagtgttgtccttaatgagtacattttaaaggcgttagacaaaattagatctgtctttgccaactcttactatctatcaggttacaattccacaaagtaggctactcactttcttgttattctaatccaaataataaaaagaactcttcttccagttcttagcaattttcctaagcctctgatcattttgagttctaatcctccttcaattcttttaggcccatgtcttcagttgtatttgttctcgattagctgaccctccatttttcccataagatatttttcaatgaatctccaaaactttaaaaccatggaagaatgattgcaaattggcaaagtgttatagctgtgaagaagtcgtcatcgcacacagagttgatggcagcaaaagtaggcacagacttccagaaagctaatgaccaatataaacaaaagtaaagtaaataccctctgactgacaattccatttcccagaatttagcccaagaaaataatcatgaaatagtcccatgattttggtccagagatactcaatgcaataatatttgtgatagtggaaaatgttaaacaacctaaatgttcagcatggtttgaaaatagctagtagaagaaataaggcatattttaatggctatcagtttttcggaaaggtaaaaaagtgcaccaggaggaattaaaggttgagatgcctcatccaagtggaaaaagtacatctatgtagctacatgactgattattattcagccaccaaatatggtagtatagaaaatatatccatccatacatatgcatgtatccacatatgtatctaagaggatataattaaattgttacaaatagttatctttgaaccattttcactttcttctttctctttgtccatattttataaatttcctacaatgaatgtgttcattgtagtcactaatattcttcccccccaaattaacattgacttttaaacattaaatgaatgagaatgtatacaaggtgcctcccatatctgccaagaacttgaaattctatgaaataattcaaattatcaaagaattatcagtttactatacaaagttttcaaggcatggcaccttttgtagggggttatcttttataaaaaaatttccacttctacatttataggtcagtgatcatttaattgagtcaatactggttatgtgtgtatatgtgtgtagtcacttagccaatatgtgaatattattatcttatgatagaacacagtattcatttatcattttattgcccttaaatctgccattatttcatttctcatgccttatcttttgtgtttccttttctctctttttcttcataaataatgccagaagtggtatatttaaactgcaaagaggttattttaataacctataggaaaaaatagtccagcaatagataagtaccttaacaatctgtgataaaatcacatgtattatccacttaaaattataaatatataaacccaaaaaaacatggattttttttgtgaaatatgagcagaacccatatcatacacacctaaatttcaactaggtaaaaatgtctgattattagcaaatattttaagaaaataacagtattgtaattccatttagaaaatcattggattatttgcatttggtatttaaattcatagtaaaataattcattattaaaaaataagctgttttaccatactcttccttctctcagtcatatcttgtgagccacctccaaccatatccaatggagacttctacagcaacaatagaacatcttttcacaatggaacggtggtaacttaccagtgccacactggaccagatggagaacagctgtttgagcttgtgggagaacggtcaatatattgcaccagcaaagatgatcaagttggtgtttggagcagccctccccctcggtgtatttctactaataaatgcacagctccagaagttgaaaatgcaattagagtaccaggaaacaggagtttctttaccctcactgagatcatcagatttagatgtcagcccgggtttgtcatggtagggtcccacactgtgcagtgccagaccaatggcagatgggggcccaagctgccacactgctccaggggtgagtgtgacccatcaagactttgctgggtgtgagggtacgtatagatgataggagttgttgaaattaaggaagaagtgtataaggactatgaaattggcataaacataatagtagcttcactgtctgttatctctgttaataattgtctcaaagtaatggcttattctctcatctatagtagacatattttagatgcatttttgaatttaacatttacagcaaatatatgaagtagctactattggtatccccattttactttgagagaactgagtcttagtgatattaaagaacttttccaaggctctgactccagagcctaatcataatgtacagtggaatgtatcatgaacaataatgtgtaatagtgatgatcgtatctctatccctggagtggggcagtaggcaagtgagccatgaggaccaaaatgagagcatcaaatcaaaaaggccttggacttcaacttcaactttttctcattataattgaaaagactgaagctcagaaaaagtgttttgctcaaatccaaacaaatatatatatatgtatatacacacacacacatatatacttgatatataattatatattgttcagattgaggctcaaattcattctttgaggttttttgattgtttgtttgtttgtatgtttgtttgagagaaggtctcgctctgttgcccaggctggagtacagttgtacaatcatagttcactgaagcctctaactcctgggctcaagtaagacctctgcctcagtctcacaggtagctggaactccaggtgctcactaccacacctggctaatttttatttatttttagagacagagtcttgctatgttgcccaggctgatcttgagctcccgtcctcaagcaatcctcctgcctcagcctcccaaagtactgggatttcaggcctgagccaccatgcctagtttcaaatgcattctgatgccctgagaacacaccaattgtcctgtggatggaggcagccaacatttcggttaaaatacggtctaagcaatatgttctatcactaaaaagtctgtagcttttttttctttgagggggggttgttctttttgtttatttttaatttattaatctttaatttttgtgggtacatagtaggtgtatatatttatgggtatatgaaatgttttgatacaggcatgcaatgtaaaataatcatggagaatgaggtatccatgcccttaagcatttatcctttgtgttacaaataatccaattacactctttcatttttaaatgtacaattaagttattactaactatagtcaccctgtcatgctatcaaatactacatcttattcattctttctttttttttttgtacccattaactgtccccacctcccctccctaccctcaccccctatccccacgattttgttcttgatgcctcctcttttcttagctgaaatgactggcttaaaacatggagtgggaagaattaggactggtcacagggacagaaaggaagctaacagttcagccctgtgctgactgaaagagggtcagggagtgtggaaaatgaagaatacgtgaaggtgtctgttagatgagaccttggcaacagtactccttgctgttgccttacgcatgagcttgagggactgcctctgtaggaagtggaagagtggccaaaccacccgcactcacgactctgtgctccataaccagtagttgaaagcaagaggaatatgctgccttatagtctttggaacatgtttcagtagaaaaaacacagacaaggtgttggagagactttgattctagtcacagttctgcttggtttccttagcttccttgttagtgagatgtggctactgaactaccaatcttctcttttaatagctgcactctgcaatgacgatttttaagccctctggtaagcataagatatagcaaaggaaattgccccatatctaacaagtgctctggaactgtcctttccacagtgtgtcagccgcctccagaaatcctgcatggtgagcataccctaagccatcaggacaacttttcacctgggcaggaagtgttctacagctgtgagcccagctatgacctcagaggggctgcgtctctgcactgcacgccccagggagactggagccctgaagcccctagatgtacaggtgccttgactctctggcttccagattgctctgttttccccttcacatggaggacttactcctgttgttttattttttcttctagtgaaatcctgtgatgacttcctgggccaactccctcatggccgtgtgctacttccacttaatctccagcttggggcaaaggtgtcctttgtttgcgatgaagggtgagtgtgacccagcgttgagaccaaggactcagtgtggagaatcactctcttgagatcaggggttaatccaattaaggagctgacctagtagataagaagtacccagagagattaatttatggaagggtagttttgaaataagggtagggactaagtggcaccactttcagaaggcaatgagaaaatggcacatacagctcaatgtcaggtacaaacctaaatacagtcactgatcttgagtacacagttggaacttgaaatgaatgggtacgtatttatttggaggcaaaagaacataattttataagaggtatgctagaaaataaatgatgaataagacaaaaattgtttgccccataagaagtaaggtagaggttgtcttaagaaacttaaaaccaatcaatagtggaatctgtaatagtgcatggataagtgtgttttaacccaataatatatcttcaggtcaggaatggccagtgtaattcttttaatgcaggatttttctcagccactttgccagccagtgacttctggacagcaatgcccctgcccaggccttgcttgggcccaggctcaccgcaggaaacaccccagatacttagcccactgggcggcgtctggctggtgctctgactgggaccctggggccaccatgactgcacactcagcccctggtgggaggggatgtgtgagtgagtgagtgtggggtccagctggccactccaagcacctgcacaggaatgggctctgagcagtgctggcggctggaccaggcatgtcacactgaagggaacgtggtggtgcccaaacaggggtgcccatgaccccaaagcccagaggaggtgttacagcacactaatggctcttagcatttgataatgcctgcagcccaacagatggcagtgtgcttaacagctctgtcaatcctgtcgccccacatctcctgtcgcccagctctggcttgatccgctgctgcttcctttcgcgtggtacagctgccctcccacagcagagggcggagggccacagtgttacaggcttctttgtacctgcgtttggtgggtcctgagttgttgtcccgcatccaagaagaacaaggttatactgacaatagaagggtgaggagggtggagaagagttttattgagtgacgaaacagcttctcagcggagacgagacacgagggtggaccccagatgaagtcagggggtcattctctctctcagcgtggctggttctggggcttttatggacacagaatggggagcctgtgctgattggtttgtgactatgcaaaaaagactaaaacaaagacaccactcaaaggtgggcacaacagtgtaaaaaaccaattagggaagctcaggtatatgtaaactaaatgaacagtgaggatcaatcagaggaaagcacaccaaatgggaagagaggttctcaaaccagtccatggatttacctggaacttgtagctaggctttaaactgtcttcagcttgaaggtcgggtttcaccgggatctgccccatctgcctaggatttgtctgcctcctgcttctatcagtttcaagtggtattattagttgtttatgtgtatccattactcttggtggtgtgcactatgagtctggagggataactagattgggcaattaagcagttatttttaatgatttccaaagaatcttcggcatttacaaagtccaccacctaataatgatttccaatttcagaatgatttcagatttcagaaggcaagcaggattcaataagttgggcattttggggtgcaaagactcttcccccctcccttctttttttcttagagcacgtggttcagcatgcttctgtgagcctcctctggcctgttacagttgtagtagcaagaagaacagtgcccgttctctttctagatgttcctggctttgcttaccaaatcgagagctgttctgcctcatgacccactaatgagaataagtgggatgtcagagagccatcagtgaaagatgacacctgaaggttatggctcttgtgcccatggagaagtatggttctgtgttcatgccttctgtaggtgatgctgggctatgaagtttatatggcaattatgcacatcagctctaattgctttgccagtcacagggtaccatggttctttagaataaattggcctttgagtttctgtcagctactgaagaattcagatccctaatgaactaagacttttagctgggcctgaacctaagacctaaatgatagtcgaggaggaaatggtagtgaggaagctgagcatctattagcgaagaaatcaagggagagatgggaattgctcacacatttgctaccactttttttttctttaggttccgattaaaaggcaggtctgctagtcattgtgtcttggctggaatgaaagccctttggaatagcagtgttccagtgtgtgaacgtgagtagaaagaactatgtagtttggatagctctccttattttcgttttccagcatgtttttccgcatggcatcacctgttgtctagatctttacttaactaaattatggataaaaatacttctttgttggaagaatttcaagaagggtcttgtaggtcttctctgacatgtgtttttgttactaatctgcaaatcacttagtttaatgactgtttaattttgtggggaatgtgtggcaagaaactagatgacataaaggtgcagcacgttttagtcagtcatttatttttagttttcttatcaaggaggaatctttcttaaatttttatttttatttttattttctgagacactgtcacccaggacagagtggagtggtgcaatcacagctcactgcagcctcaacctcctgggctcaaatgaccctcgcacctcagcctcccagtagttgggactacaggtgcatgccaccacacctggctaatttttgtactttttgtagagatagaatctcgccatattgccccagctggtctcaaactcctgggctcaagctatcctcccaccttggcctccaaaagtgttaggattacaagtgcgagccaccatgcccagccaaatttttatgttcttttatcccctcgcatatcataaacaatttagtcagcttgttttttagcctgcagtatttaatgacatagggcttcccatgtgccaggactttccatgtgtagaaaaagcaatgaatagtgaatgaatagtgaagacacctccctactttcctgggatgtattttcttgttgggaagcagactatgaacaaggaaataaataagtaaacaaaattctaaaaattataacatataaaatggtagttaaatagggatgttatggagaaaataaaacagagttatatgataaattagtacgatggaaggagctgggatgatgaatcagtgtctgaaatgatgaggtgtcctaagtttccaaaccatccgcttaaataaaatatgccaaaattcagaaaaaattcagaaactcttagataaaagtacatgtttgacataccaagacattactgattgattctattctgtctactaaagcaaggcaagaattttttaaaccttgttttcctgattattagaaaatgtttattttaatttgtattgtgttaaaataacttatagaaatcaatttggataccttatggtgagtattatggtgaagaacattcaatacctgaggaaactcaagtattcaacaaactcaaccttacagagacacatagagctgaaaataaatatataaataaacttaggaaaacacaaacaggtaaaattcaagcatgagaagtcaatcattgtttgatgtactaggtcttttatatacacataattctgataaatttgggtatctcttcctaaattcatatcaaactagaagcatcaattgcttttagggaaggaactgttctaagcagactaaaaggaggaagaaatggtggctaataattggaagaaatcaaaaaaggctctttggcaccatttaatctgagtaaaaacagccttactggtgtctgatgacaccactggaaatttggtattggtcctgatggtaatggtcttgaatcaccaagaaacatttacattgctaaagatgatagctcatgtttattaaagttcatagatttccttgaaacttatggtctctgatgaccaaaactttgtctgtcttgaacctcattgtcaactcaggaatcttactatgcctgagttaaagtagacaaccaaatgggtgtttttaaaaaaaataaaaacaattactttccaaattcattgtgaacataggtacctgagtggtccaggaacactgtctttgggcttttgcaataaactgtaatttaggtctcacttcagttagttgcctctcaacaaaagccttacagatttaaattccgtctaccttagttatattctttctaaaagttatattctttttaagcgcacagtcacaggtcactattgtttcagtcatcttaagtgaaattctaatagaacttaaagctcttgttttctttctagaaatcttttgtccaaatcctccagctatccttaatgggagacacacaggaactccctttggagatattccctatggaaaagaaatatcttacgcatgcgacacccacccagacagagggatgaccttcaacctcattggggagagctccatccgctgcacaagtgaccctcaagggaatggggtttggagcagccctgcccctcgctgtgaactttctgttcctgctggttagtacctgcttccacatatcctaaatgggttcagaatatctaggtaagaacctccatatttctatagtgacagtcatttttgcttgtgaaaatggctttgctgtaactgtcagagacagaactacctcccaagtgaatgacaaacgggttatagataggcacgctgtctcaattgttggtattctgatggtccttcctatggggtgaagagtgtgggatggtaaggagagaagggggtggacagtgaagagaattgatgaggtccagatttagtagggaatgttttcaaagtactgaaaacaaatgctaaagaaaatactcttttattccacctctactactacgagttatctttatcctggagagatggatgtgctgtgcaaaaagtacacattgatgatgtaatttacttcagaactgataacgctataaaagtaatttgagaaactcagatgtagggatttatacttttatgttgnnnnnnnnnnnnnnnnnnnnnnnnnnnnnnnnnnnnnnnnnnnnnnnnnnnnnnnnnnnnnnnnnnnnnnnnnnnnnnnnnnnnnnnnnnnnnnnnnnnnnnnnnnnnnnnnnnnnnnnnnnnnnnnnnnnnnnnnnnnnnnnnnnnnnnnnnnnnnnnnnnnnnnnnnnnnnnnnnnnnnnnnnnnnnnnnnnnnnnnnnnnnnnnnnnnnnnnnnnnnnnnnnnnnnnnnnnnnnnnnnnnnnnnnnnnnnnnnnnnnnnnnnnnnnnnnnnnnnnnnnnnnnnnnnnnnnnnnnnnnnnnnnnnnnnnnnnnnnnnnnnnnnnnnnnnnnnnnnnnnnnnnnnnnnnnnnnnnnnnnnnnnnnnnnnnnnnnnnnnnnnnnnnnnnnnnnnnnnnnnnnnnnnnnnnnnnnnnnnnnnnnnnnagagagagagagagagattgtactcttagcctccatagctcattcctttgatatattagtctggctttaaacgacagtacctgacaactgtaggcacatgtgtggctgtgactgcccacaccagttccatcttccagtaaggacagaacagcactgaatcggtagcttgtcgatccctgtggtactcccccatctgatctagtttgaagttagagactgtagaggatagtgtttaaatgtcaagaggtctaggtttagagaacccgtctttcactgatcaaataggagggagtggcttatgacctggctggttgaggtcttcatgtacctctaatagccagagatattggatgtgttcatgtattcatatgtctatgtttaactgagtgtcttttcttgtgtttgtgtgggaacttgttcttagcctgcccacatccacccaagatccaaaacgggcattacattggaggacacgtatctctatatcttcctgggatgacaatcagctacatttgtgaccccggctacctgttagtgggaaagggcttcattttctgtacagaccagggaatctggagccaattggatcattattgcaaaggtgacttatttcttggtattccttattcttgctgggttgtatggaatgcatgaggcttgtaaggctgagagacattgaaatgagcttaatgaaagggataatatttttttcttctcggcaactgctttcttttcatttacataaaattatttcatcttattaactgtcctctttgcatggtcgatagcagtgcttctccatccagagcattaacaaaatcaccttgttaaaaagattctcaaactccattccatggcctctgattctgttttaaagtggggtcaaaagtctatttttaacaaactcatcagaatgctctgatgcaggaagaccacagaccacacttcaagaaataccactttgccttcttggtttgtatctaggaaaaaaatattgtaggcttaattttgagactattacaactgaaaagaagtctgtgcttgaagatgaaggatgtactgatggctgggcagaaaaagaaagtaaaacaaaggataagttaaacaaaataaagtagtctgggtgcggtggctcacacctgtaatcccagcactttgggaggctgaggcgggaagatcatgtcaagagatcgagaccatcctggccaacatggtgaaaccccgtttctactaaaaatacaaaaattagctgggtggtggtgcgcgcctatagtcccagctactcgtgaggctgaggcatgagaatcacttgaacccagaggcagaggttgcagtgagctgagatcacgccactgcactccagcctggcaacagagcaagactccgtctcaaaaaaaaaaaaaaaaaaaagaaaagaaaagaaagtaaattaattagaaagatgtattaaattcaggctgggcacggtggctcaggcctgtaatcccagcactttgggaggccaaggtgggcagatcacctcaggtcaggagttcgagaccagcctggccaacatggtgaaaccccgtctctaccaaaaatacaaaaattaatcaggcatggtggtacatgcctgtcgtcccacctacccgggaggctgaagcaggagaattgcttgaacccaggaggtagaggttgctgtgagcccagatcgcgccactgcactcctgcctgggtgacacagtgagactcaaaaaaaaaaaaaaaaagaaaaagaaaaagaaagaaagataaattttaaattcacaatcatgatttactaacttctttgttctatgtgcagaaattggccagaattatgcatttaataaagagcagagtgccagtatttgttgtgaagccagacagaattaacatggtactcctgttccctcacagcgtgaccccagtggctccagggctagatcaccgttagcctaattcctaatctttccacagctttccagttgcagagctgttaatcaacagtgaatgcacagtacattccatattctattactttacattaagaaatgggagtcaggaaatgttaaatcataaggtttttggaggaggaagattagtaacatgtttaaaaacatgcttcctcttagccaagggcaaaataggttttggctattttctcctattctcgcagttaaaacggacaatcaacaataaaatatcaatttctttctgatttgtctaatttcagaagtaaattgtagcttcccactgtttatgaatggaatctcgaaggagttagaaatgaaaaaagtatatcactatggagattatgtgactttgaagtgtgaagatgggtatactctggaaggcagtccctggagccagtgccaggcggatgacagatgggaccctcctctggccaaatgtacctctcgtaagtgcaagtgcaaggaatgtgggatcttcccggtcatggttattgctcattcattcatccatattggcatcaagtgtagtgtgatgtttatggcatatgctatgagctatagagtacaatatgagcatccacctattccaaaactcccatagtgagagtaaggccagacttcctcttctcatacttctcactgcagctctgcaccttttttgtctatatcactttgtggttgcatgagccacacagtaatgatttatttacagcctacgagccttacaagaaatgttttcagcatgagttagggagcaccttccaagctgcagagagcagccggcctgtctccctcactactggaggggacaggattttaagctagcacagctggatagagcagatttagaaattacgtatcattgagctctgtagaagagtagccctctgctggcaactggaaggtactgtaagatagaaaactacccacatcatggagcagatgagcaaagttaataatgaacagcctttcttaatccaagttagtgctacactttcccttctccccatctcttatgactcttctaatacatggttctacaccaagattgttcaagatccagttttacaattaatcctgtaaatatgctaatatgactcgcagataatatttctaaattatcagcttgacactcccttaatatcaaattatatttgcttttttggcaaaaatctcactggataacttactaaatgcttttagagtattctgaagatctggctgggactgacagaaaattcaggtcattggagaaccaaccgtatcaaatattagaacaaaatataaagcaataatacaaaagtcactttgcaccaggataagaagagacatacaaataagtggaacaaaattgatattaataaaataaaggggccaggtatggtggctcatgcctgtaatcccagcactttgggaggccgaggcggatggatcacctgaggtcaggagtttaagaccagcctggccaacatggtgaaaccccatctgtactaaaaaataaaaaaattagctggtcgtggtggcagatgcctgtaatcccagctactcaggaggctgaggcaggagagtcgcttgaacacgggaggtggaggttacagtgagccgagatcgctccattgcactctggtctcggtgacaagagcaaaacattttttaaaaattgtccattaaattaacaataaaaaggttgttaggtgaacacccaatacaaagcaaggatgtgatgaaactgatattgttgtgtgttgaaggtactattgtaaatttgcaaaaactcttatgaaaaacaattatgaaatgtatgtggaaaataatacaactattcctgccagttagccctcctagaaatttaatctaaggaaataatgtaaaatattaaaatattctatgcattttattaagggtttcatgagacagaaacctagaaacaagctaaatgcacaatagaagtcattgaatacactatgatgcatctactagattatgttagtttgcctttgttgtaacttatatttctagtatataattatgtgaaaacacacatataaggaaatgtaccagaacagaatgtatcaaaacattttttgggtatgaggattggggtgacttttttctttagttctgtattataaattttcttctgtaattgtattaataataatttttaaaagtcttctctgagtgcagaaggtaaaatgagagtatgtgaatgaaaccaatggctttttgcattagaaaaaatattagactgagtcctgaagaaaaatcaggatgacttgtcactggctgagaggtcctgttcaatcatgttgcatgccagagtgatgttttgtgacttttgtcttccttttaggtgcacatgatgctctcatagttggtaagttttatgaaagttttgctgaggaattctggcatctataacagtaagtacctacctataatgaatgaaatgtaaaaagagagatcaaaatgtcttgaggtgtaaagagatcaaaatatcttcagttgtaagttcaactagaaagaaaataatgataagttaggccacaatatggtgaaactggcatcgtcatatgcatactaaataaccttcatcaaaggctctttactatctttgaaccattacaaatgaataatcattcatcagtgtcaaaaattctttatttgaatgtggtgggagaatgcaacttcttctttcagttgtaacctggagtatgcttccagatggtgatcctgctcatttgcacaaatagaaagccataagaccagtcttctgagcccatatctgtgatttgcctaaataagaatagttttgtaataaagtttgcttccaagggaatactgtggcatattactcttacatccctttttacgcatctggacactgagacacagagagttaacgtaacttgtccaagaccacagaatggggtagcctgggtctacttatctgtggagactgtgcactttaacaatcaataaatggacaaaatgacctaaatatgtaattcaacaagagagagaattccagtattttcacaatgaaatgcctgtgtgttaagtcttaggcaagagacatgggcagggccatggagagctggtggccagctgccccatcacggttctcacttacttttggaaaagctgacattggactaaacgttacaaaacggctcagctcacaccttaactttaataaccctgtgggagtgagactaatgctatagaaacccagagtaaagcagaatgtatagttacatctttaaaaaaaaaaaagcattggcaatctgtagtgggactggatactaagatagaatttaaaacctgtaagttatattttccatgcatttaattaccttgttttactgcctaggcactttatctggtacgatcttctttattttactcatcattttcctctcttggataattctaaagcacagaaaagggtaagtatagccatattatcccaagaaatgtaaactgtacttaccccctcttggaagtcaaaagaaagtaaaagacaaacaaacccattgctacataaacagatgtggtaattcttataaagaaagtccttgacacacagtatagacaaagaggtattcacactaaaggaagtatataggatactaagaacaattaaaaaataataataataacaaaaaaaagaccatttggccaggtatggtgactcatgcctgtaatttcagcactttgggaggccaaggtgggcagatcactagaggccaggggttcgagaccaacttgggcaacatggtaaaaccctgtctctactaaacatacacaaaattagctgggcgaggtgggacacacaactgtaataccagctactcgggaggttgaagcatgagaattgcttgaacccaggaggcagaggttgtagtgagccaagactgtgccattgcactccagcctgggtgacagagtgagactacatctcaaaacacacacacacacacacacacacacacacacacacacacacacagcattttaagaaggaattgagttttacagaaagagaaagtaggcagaaggggtttttaaatagttgttcatgaggctgtttgatatcctagttttgctaagacattgcagacactgacctctaagcccagatcctatcatagcactagaagttagattgggtcacttatggcacacatatcatatggcacacataggctgccagtggggaagaattgaaactttccattgggtattttaatatataaacaaatattttgtaaacaccattaactttttttttttttttttttttttttttaagaccgagtcttgctctgtcacccaggctggagtgcagtggcacgatcttggctcactgcaacctctgcctcccagattcaagcgattctcatgcctcagcctcctgagtagctgggactacagccatacgccactacaccaggctattttttgtatttttagtacagaaagggttttgccatcttggccaggctggtcttgaattcctgacctcaagtgatccacccgcctcagcctcccaaagtgctgggattacaggtgtgagccactgggcccagccatcattaattttttaaatttgaaagaaaaaaaacttgcaaagactaagatctgaataaagaaacgtctttgacagggaagagaacctacacagcttttgtactggttgattgaattataacaacctcaatgaggccagaatcaataatatcaatgttatatggttgatgagcaagttctatacccatagaaaaactgaatttgtaacttttaagtgaacggttttctatagcaaatattctaaacaagtacagtttcctacaacaagctttacagaaactgaagttttgatatttcacaaagatgccaatatactttttaaaaagtagtttgtcatagtagatcttgctgtaaagaacctagacaggaactcaatttcatggaaaaatactgaattggtagatatttaaatttaaatatccatccttcctaactaatgttctctatattttacggcttgacatatattctttgctcttttccattataaaaagaaaaggtaagtagctgggcactttaccttaacaaagtacttgtgtcaatacatttttcctcttaaagtttctcattaagtaccatataattagtgagttaattttttaaaaaattactactacgtctgaattaaaggagttggggcttctaattttctgtatctatatcagtctgtagttaaaaccacacaggggaaatgattatcccttcttcttggaagtattcaagatactttaatatcttgaagatatttgattatctccacccttctaactatgtcattcttcattacttatggtccattccttgttaatcaactagagggtcacactcccaagcctaactattgatttgtttcacctacataatttaagatcatttcctcatattaatcaccttcaggcataaacatgactcaataaccatttcataaaattatttctttggaaatgattgtcttgtaaagtctaagcaacctgagaccatataccatttcttcatgttttccatctcgtaaaacctgcctcctatttttttcatattctttaaagtgtaatgtccatggcacaaccattctctctctgaccagtggctaccagaaatgtggcagaaagaaagatcatgatccttgttagacttaaaggtcagggaggtaaacctcccaaacatctatgtaacccacactaaaacctattctatatgtgtaatccaggaaagtttttaaacattttctaaacttttacttttgacctgtttcacttcttgggattgtaactgcctgatgtgttcttcctgcctgtcatacagacaaaaccagttccctgagataatggcatattgcagtaaagaaagagatgaattaatacaaggccagtcacgtggaagaactggagttatcactcaactcagtctccccaagaacacaggggctagggtttttatagatcatttggtaggaagggagctagggaatgggtactactgattggttggggatgggggtgtgggaaatgttcctcatgtgctgtgtccacctctggttgggggccacaggaccagttgagtcatgagtcacaagtccaggtagagtcagtcagttgccaaatgcaaaaacctgaaaaacatctcagaagaccaatcttatattctacatagtgatgttatctataggagcaattagggaagtcacaaatctctgagcagtaatggattataaaacctatgcctatattttagcagagttcaggtccctctcctaatcctaatctcttggcctttcattaggtttcaggtcctgagcaaggagagagctagttttaggaagagactgttattatccttgctccaaagttacattataaactaaattcctttcatggttagcttggcctacacccaggaatgagcaaagccggcccacctgtgaggctagaagcaagatgaagtcagccatgttagatttctttcactctcagaatctttgcaaaggtggtttcagcatagtgagtgcatttatctaacaaaacaccactgattttcatgttagaaataacacatagctaaaactgggaaaaagaagtaataaacttaaataatcagaaggcagaggtcccttctttcggaaggagttgggctgattaatcatgcagtcatacctccttgagtgggtgtggccaataagctaagtcattgtggctatgtgaggagggctgattattccttatctggagctcaagctttcctcacagaaagacaagggcataaagggcctcatggcaaagaagaaggaagccatgtgggaaacacagactatgagtggagagtatcgtagtggtcaccaagtcagaagagccatttatcctggagctaaaaaagactgacagatatagaatagtgtagaacaagatggcctgctctatgggagagccacagtcacaccaggcctagagaggtgcaggctgacttctacctcaaacactggagacaattcagaagctgcataagcagtctgaagacttactaagaaactaaaatgaggctgggtgcgatggctcaggcctgtaatccctgcactttgggaggctgaggcgggtgggtcacctgaggtcaggagttggagatcagcctggccaagatggcaaaaccctgtctctactaaaaatacaaaaattagcctggtgtagtggcacatgcctgtagtcccagctactcaggaggctgaggcaggagaattgcttgaacccaggaggtggaggttgcagtgagttgagattgtgccactgcactccagcctgggcaacaaaggcaaaactccatctgaaaaaaataaataaataaattaaattaaataaaacaagaaaagaaactaaagtgatagagaaatagaaggaatacacacacagaaatgatctcaccttctttaaaatgctcctcaaggaggtctactttaactatcctagtaaagatgacatgaccccacccccacattcccagtctctcttatcctgctttatttttttcatagccttattctcttttattataattaattaaataattacattccatgtttattctctctctccctccatgaagtcggggatttttgtcctatcttcaccaatggatacacaacaaatctaaactgtccctgggacaaagagagtctcaataaatatttatcaaatgaatgagtgagctacacaccactaacagtgttaccacaaggggaaatttctgccgtaattctctaccaagttgaacagtgcgtctttaacttgtcctaaacttactccaggtttcaaggctgctccttgttctaatataccaactgtctcagtctgttggtatatatacttgggcagttataacagaaactccatagactgggtggattcaataagcatttaagctgggtgcagtggtacctgcctatagtcccagctatctgggaggctgaggcaggagtactgcttgagccaatgagtttaaggccagcctgggcaatatggtaagaccatgtccctaaaaaacattatgtcatttctaaaaaccaagcatttttttctcatagttctagtgggtagagagtccaaggtcaaggcaactgcaaattcagtgtctggtggggatcgctttctagttaatagacttcaatcttttctccgtgttctcaaatcagagaaaaggagtaaaggagctctcctggtctcttttctaagggcactagtcccattcacaagggctctgctctcatgatctaattacttctcaaaggtctcacctttgagatcctatagtaattagatcctataaattttcaacatataaatttggaaagatacaaacattcagtccattgtaccaacactgcatttggtaagcacatatgcttaaacgatatcacacttgatttcatgtgccttctcaatcctcagctttccctgattaagaatacctaattactctgcccatttcctctgcaccctccaccttggcctttccactcactattactactatctcctgccttcttggtctctactattctcctcaccatccctgctccctggactatgatcccctgtgagcagggaccacctatatccacccaaagcaatttttatttaatgattttttaatctctacttgtacagcagtcaaaattaataataagagtagaaatggttaatgtatctacaaaaagagttaacatgtttatttataggtttatttaccatttattatcttctttggtcctcaaagcaactctgtgaggtaggtaggcccaatcatattgttatcccaaagcataaaacactctaggttcaaagaaattcagtggcttgtttaaagccagtaggaagttgttaggaattaggcctttagtccagattatttaactggaaatcttgaactctttgtgctagtattttgacaatgttagttgccatttctgaatctgactctatattactgaaattcagtatccagaactgtacatagtacaaacctaaagtattttccttttttctttcaatattctttttctccctatattttactgagtttgttttagctactttggtatattgaaccagtatctttctagagaaccgtatgcaatctctactttttttactctttattctgagtcattaggctataaaaaattaaggtatttctttaagggcatctttccatattgagatttcctggcgtttcacacagacttggcaagttcttcctgtgatttaatctcactgccttgttatttcactagttaaaaatatgcgcctgcacgttttgatatttcactgtgtatttacaacaataatttgtgataatgttaaataagataggtcataagataggtcatgcactcatcagtgaggaataatactggttagacttcttcattcagagcccattattgcctcttgttactgcctcgtacccactcccatttctacacaaaacagccttgtccacagtcaaaatttcaaagtttccattgttgtgatgtttagaatgataaaatacttaaggccatcctctgtgaagtctccctgaattttcctatgttcacattaaccaccagtaactaaccaaatagctcttcattcaacatatactcaccgagatcatattctccaaaaccccatgtaccactcatcacccaagaccaccttcagaacactactcatcttaccacttaaccaccactccttggaaggtcataccacctggctatataccactccactcttcctcatccatggatctcaagtgtgccttccctgtcctgtgaaaactctgccccctgaagcagtctgcctctttttctcaaatgatgctgtcattctaatttccataagatggtaaagaataactgagtgatgaggaaacagtggtacatgttgaagtgagttaactcttcaagcttccattctaaaatccctaataccaactcatacataaaatctccaggtactggtactgttttatcatttcattgataaaagatgaagtgtttattaacccccaaagaggcagtgtaccataccaagtgagggtgagggctttgcaaccgctaaggcctgtgttcacagtcactcactctctatgagaccctgagcaagatacttatcctcagtaaatttcattttccttgcctgtgaaatggagataataatagttcctaccttacttaacatagtgcctcatttatgatgcatgtcagaaaatgttagctattatttacacatgattgttattactgatattaaaaagtgagtaaatatttctttttactgttagttcttaaataccttcatgacagctactgctgctcccctaaccgtggatattgcttgtacagaaaacagaacacatatcttcactataggagaaaaaggaagcctcgtgtaacactgcagtgcaaagtcattcatgttgtgcagcttaagtgtcaaaatctcgatgtaaatcctatttactaatcaaaattatgtcagaaatagtgaaatgtgttaaggcatggacatctgcctataaacaatttagagtactctgacagaaaatataggatgattttagtattattttctaatctaagtttttgcttagtattaaaagatgagatttggttatgattttcctttcagacgtcttgcaaagatatcaggaacttaaggcaaataataccttaaatttcaaaatgcaaattactaatttctttcaaaacagatacttaaatgattaagacagtttttctatttttttctctgccaattagcaataatgcacatgaaaaccctaaagaagtggctatccatttacattctcaaggaggcagcagcgttcatccccgaactctgcaaacaaatgaagaaaatagcaggtacctatatacatactgaattcaaaatgttttcaacaactcaaatatcaaaaatggaaacaggacttgaatatgatattgcactaggtaggtcattgataccaaagaatttagaaagtacttcaggagttggaaacttcttttttttttattggattattattgtcatttccactgttttggggtgatgactctataagttagtacagtcacagtcactactttttcaaagcattcctataatttcctgtatttatgctatgaaactttgagaagtagtatgcttttttcttgtggaacccaagaatttgctgcctgcttgtacctccaagtcttccagcttcccttaaatgcacagagtcactttaatgtcctctagagactttcactttacctccccagccaccaacccccttgatttctgacttccactgaattctctacttcatttggcctctttgactgctccttcttttggtcctcattcccttgggcttattaaatacctaacctttcattctacctattcaaagcaggcttactgcaagctgttgtgcagtacacattgctaaagatttggggtgaaaagggaaattataccattatcaaaagtggtatgtatcaatattagaaatcactgaactgaaaagtaactagtacaccagggacctgaaaactaccacctgtgagccaaatccagctggccacttgtttttgtgaataaagttttactggggcacagccacacccaatcgtttgtctactgtctctggctcccttttatactacaacagcagagctgagtagttgcaacagagaccccaaaagccaaaagtatttactatctggccctttagtggaagactttgctaacccctgaactatatcatactatgagaaatttctcactggctagttccccttttaacctgggctttccatcctcttcccaggcctctctctctcattggatactcctctcttttgttcaaatctttactgcattctcagggtatgcagtaaatacaggcattcagactctcgggcttcttgcaaattcaaaactccatttttctttaaaattcagagcaatttatttggctctggcttactttggctatgcccaagaatcctaaaatgtcctacccataggtgtttggaacattttcaggaataagatcaccatatgccctagaacagaattaggccagtcctgtagaaagcagaagcaaaagcaccacaatcattactgaatttcctttctttatgtcctacctctttctcatatacctgtgcattaatctaaatttggcatgttacacctacatacatcagaaatcctaaattcaacagaggacagtggaaggggccccaggaaaagtaaaggaagtggaaaaggtattttatagttaaccaaaacataagtagaagcaattcaaacttttctaaacaaaaaattacagattatgtcctattttctcctataatagaaatgaatttgcaatgccctgtttattatctgtcttcctagttgctttgcttctagcttatttgtcattactgtttatgaaaacaaatgaaatatgcattgcttttttaaaattcagaattgatattttactttttgaagctttaatgtttatctggcctgatccttctcaaatgggcatatgtatacactgggggatacatggctaatgctaatataccaaggggatataaaaatcataagatgaaaatggcatggtttcctagagaatatatttttctaatattactccaatagttcaaataaaaattgtattatttcaacatgaacacaaacacatttataagggaggaaaagacaaataaataatgcaggaagtttaagataaaataagacggctgggcgctgtggctcacgcctgtaatcccagcactttgggcggccgaggcgagtggatcatgagtcaggagatcgaggccattctggctaacacggtgaaaccccttctctactaaatacacacacacacacacaaaatttagccaggcgtggtggtgggcgcctgtagtcccagctactcgggaggctgaggcaggagaatggcgtgagcccgggaggcggagcttgcagtgagccgagatcgcgccactgtactccagcctgggtgacagagcaagactccgtctcaaaaaaaaaaaaaaaaaaaaaaaaaaaagataaaataagacagaaaatattgtgctttcagggatgctttagactatgtctccaaagttcttgcgtgaggcattcattttcctttactatcagagtgctatgggggaaaagtcaggcagaactgattcagggccagctgtgtggccactcatttacaaacagacgaaataacagcagactggaagaacaacaaccatttttacaagagttcattttaaaaatattccacaatgataaattatttgatttagcctcattcctgtcagattacctgcctaaaacacttttccgcctttctttctatctaaattccctgaacccagctccagctctgaattcaatcaaccaagatgctctcccaaacaactctagtccaaaatgatatctctctttgaaactcacatttcctgactacaccatttaaaaaataaactaatttattttaacagtaatatctcatcattgttaaaaacaagaaataggggaaaatataaaaaatataaaaattacctgcaataatctctatctagtagtattcttaagcttctttgcatattattagacatttgcatatacaccttgagattatattgattgcacaatattgaatcctgctttttttaccaaatgacaaacatttctcccatcattataacagtacataacctatagtaattgacatttcctgtgttgttttttgcctgttaactctattgcattcatgtagttgcttatttattcttcaaacattcttagccacttacaatgtgccatacattgtgcttatgtgtgttttcttttccatgctaaattaacctctgatgaatagagacaattttttaaagatctccccaatctctgagtataatcaaatgagaaatgttcagtaatcaactgagcacgttaatcaattgagaaatttttcatgcacgtccctgtgaagagatcaccaaacaggctttgtgtgagcaacatggctgtttatttcacctgggtgcaggcgggctgagtctgaaaagagtcagcgaagggagataggggtggggccgttttataagatttgggcaggtaaaggaaaattacagtcaacggggctttgttctctggcgggcagaagtgggggtcgcaaggtgctcagtgggggagctttttgagccaggatgagccaggaaaaggactttcacaaggtaatgtcatcacttaaggcaaggaccggccatttacatttcttttgtggtggaatgtcatcagtaaaggcggggcagggcattttcacttcttttgtgattcttcagttacttcaggccatctgggtgtatacgtgcaagtcacaggggatgcgatggcttggcttgggttcagaggcctgacaaaattaatttatgaaaatttcatttatcctcaactttttggaaatactcttacatcaaagtacacctcaaattgtgtacactgactactgatcacttttcggtaggtataaagtccttaaaaattttgtttcaactttcccttttaagattagaattttgaccacagtgttccatgggaacaaagtgaatcatctgtggcaaaatatgctagtcaagaagtgagttagaatctgtgccaagcgttaagaccttgtgcacccaggttctggggcggagtaaagaggcaggctccaaagacatagctgtgtgttggacatgagagtatttggaggaatacaggtaacaggtgatgctgggaagtcctgtgaaatggaaggagaacgaagatgaggaatctggtggcagtaataaccggggaacagatgagctggaggcctcatcaggaggggtgtcccttggtggaaggacaccattcccggccttaaaaggagacgcttcagcacggctggggaagcacgtggataccttgtactaaatccactactgcagctcattcttaactgtaagtagaagaggaggacatgctttctgaagctgacccctccaagatgaccagttcctatttctgtcccctgctaccaccatggtgtagaacaacagaatcaaaaaaacattttttctgttatgggtgacctgtacgttttctagaatggaaggaggctgtttagtagctcaactctgagaacactttttctttggacaaaattaaaaaaggaaaaggtcaagttaatcattaatctctctgttttctactaatgtctccattttcgccatactttctatgtcctacatagcagccatcacagagggcaataaacacttctaatgaccgtgtaatttatatggaatgctgaaggggtgggttggccctccacacctgtggatgtttctcattaggtggaactagagacttggaaaagaaagagacacagagacaaagtatagagaaagaaaaaagggggcccaggggaccggtgttcagcatacggaggatccaccggcctctgagttcccttagtatttattgatcattaatgggtgtttctcggagagggggatgtggcagggtcataggataatagtggagagaagttcagcaggtaaacacgtgaacaaaggtctcggcatcataaacaaggtaaagaattaactgctgtgctttagatatgtatacacataaatatctcaatgccttaaagagcagtattgctgcctgcatgtcccacctccagccctaaggcggttttcccctaactcagtagatggaatatacaatcgggttttacaccgagacattccattgcccagggatgagcaggagacagatgccttcctcttgtctcaacagcaacgaggcgttccttcctcttttactaatcttcctcagcgcagaccctttacgggtgtcaggctgggggaaggtcaggtctttcccttcccatgaggccatatctcaggctatcacatggggaaaaaccttggacaatacctggatttcctagacagaggtccctgctgccttctgcagtgttttgtgtccctgggtacttgagattagggagtggtgatgactcttaacaagcatgctgccttcaagcatttgtttaacaaagcacatctgcacagcccttaatccatttaaccctgagttgacacagcacatgtttcaggaagcacagggttgggggtagggttacagatcaacagcatctcaaggcagaagaatttttcttagtacagaacaaaatggagtctcctatgtctacttctttctacacagacacagtaacaatctgatctttcttttccccacatttcccccttttcgacaaaaccgccatcatcatcatggctgtttctcgatggttgctgtctctttggagctgttgggtacacctgcagactaacaacagacaaaacaggcacacaaggattaatatgaaatttataatcgtagtacttccgatggtcttaacccaagtgacagggttaagatttgcgaggccatcagcaactcctgcgattgcctcagttcctggcaccaaatttaaatgggcttttgatgtttcaaaaatttgttcctttaatttggaaatgtctaaagtgagattatcttctgttccctgtagatggcatctgaccatgtcccagtgatgctcagactcattataaacttggggtgtaatacaaaaatctgagatattccagtcacactgtaactggaaacgatggtctaagttcataagcctgtctcccatccaaatgacagtttgtctaagatcattaatttggtttgccaatttttgatcaataccagattgtgaattccacaatcttgtagaatttttttgccaatcattaacaaagtttactgactgaacagaagagtgcaatgcaactcctgccatagcagccgtagctgtgactgcaattaatcccataatcactgtaattaaagtaaaaatgaatcttttggatctatttaaaatggcttttaatacttcagtcaaaatatggacggatggcaaggcctcccacggttggtccatggacatagaaatccacacggcttctcttgccctcaccagcagaatacactgttgccaattaaaagttgaataaatgcaagtaaacaatctgcaattttcacagcttatagtttgagagtctggtttaataactatatttcctacaactagcatataagggggctttacacaggtttggaaaggaactgttagactggaatttaggttgatagtataaaatagcttacgatctcgtttctaaagtttgatttctagaccaaattctaatgcagtatgaggccacagtaagcctccataattctggatgttcaggaccagaaacaggacttattatttttggtcttggggtagagattcctttttctccctattcccaagggtagaaagactgtaattttttagcttatgtttgtctaaactttctgttaagtcgctatcaacagctagactcacttgtgcactgggacacgactgagtttgtcctgtgcaattgtggtagaattgacctcgaggtgcccaatctataatagttccgaattcactgttttgtaatatcaccgcactattggccacacattcttcccaaactaaaacttctgtattttttgatcctttgggaatttccttggggcaaggtttccctttaggtctaaattttaatgatctttgataagaaaagtcttgtaaataatttacccgtggcctgagtgacatcccgcttaccatgtgataagtgaatctactgatgggactgacagtaggtacttctaccaaccaattttggactgcaggcattaaacatcctggtgctctccctaggcagataggaggataatgatacccaatggaaatatttatcatcatcccttcttcctcaggtttggcagggcaatgatcatctgtggggccaggtacccatacactatcattaacatatacttcaataggattatccatccatgtgactggtgtttccatctccgcggtggcgcttttctttgcatctccgatgggttcatcgtagatcttcaaatgtctagtgggtatccaaacaggaagctgattttctcctggtgaaacacaagcaaaacctctcccccacgtcaccaccttccctatttcccatgtcttatttttattatctttccaccaaatcagttttccttcatgtgggctgttctttttaccagtaaaatgttgttctgcagaagtagtagtctgatttctataaatgtttaaaaaatttaaagtatagagtgctagattaagttgcatctgaggagtggtacattccttactgtctcccccttctttttgcttaactgagttttgagtgttctattagttctttcaactatggcctgtctgtgggaattatagggaattcctgttgtatgtgaaactttccactgatgtaagaatttttggaaagctttactacagtatcctggtccattgtcagttttgatctttttctggaactcccattacagcaaaacaagataataaatgttttttaacatgggaagtactgtctcgattatctggccctaaacaatgtaaaatcacagtactttgatacacttctgaggctggcctacgctgacaagccctgtaacagcctttagtttaggccaatttttggccactgatttaaagcaatgatagagacatctgctccagtgtctactaacccttcaaactgttttccttgaataatggccttacacgcaggtctgttctctgagacccgacttgcccaatatgcagcctttcctgttggatcagtgcttccaaaccctcctgttctttttatctcactatttccaaccttaatataaggcaggagtaataattgcgcaatcctgtctcctggactggcactccaaggaattgaagagctaataaccaattgaatttcgccattatagtctgaatcaaccacatcagtacgaatttgaactcccttcagacttagacttgatctacctaagattagtcctacagtcccctcaggcagtgggccatatacccctgtggagattttttgtgggggctcccctggaagcagagagactgcctttatagtacataaatccacagctgcactgccgcttgtggcgggggacaattgttgtactgtggtaactggctcattccctgaggcacttgggacagtgggggttgttgtccctgaaaaccctgaggaacaaagggctgaattgggaatgccccagtttgttgcggggcctgaggctggcccctttgctcattttcccgacaatggttgcccatttctatcaaatttagaatgacattgactagcccagtgttttccttgtttacatcttggacataagtcaggtggctcttttttatttgagactgggcaattcttttttagatgaccaatttgatcacaattataacatttccctccaaatgttctaacttgtcctcctaaagcaactcctgttattgtggaataaagtttagaaaatatccaaagcttatcagcctgtaaattctgggtagttcagttgtctaccatgctgttaattaaatgaaaacatcctgttatttcagggtccttccttgacaaagtactatacagctgaagaacatctcgaatacaattttggtgggaaaggagccaattgatttcaacagaatcagatctgagcttcataaagtctttgaagtgacttcacagagacgcagacatgtgcacttgaagatgctgccccttccctggtacctagcaaagctcctgcctctttgtgtgcgtcactgtgaaacccccacccttctgcctcgtgctaaacgcacacagtatctagtcaggggaaaagactgcatttaggagatagaaaatagtttggattacttaaaggaataaggtgttgcctggaatttctggtttgtaaggtggtcactgttcttttttaaaatatttgtaatatggaatgggctcagtaagaagagcttggaaaatgcagaaagttatgaaaaataagtcacttataattatgctacctacctgataaccactcctaatattttgattcattttctgcctatcttctttcacatatgtgtttttttacatacgtacttttcccccttagtttgtttccttttattttatagagcagaaccctagtcttttaaacagtttagagtgaaatatatgctatatcagtttttactttctctagggagaaaaattaatttactagaaaggcatgaaatgatcatgggaagagtggttaagactactgaagagaaatatttggaaaataagatttcgatatcttctttttttttgagatggagtctggctctgtctcccaggctggagtgcagtggcgtaatctcggctcactgcaagctccgcctcccgggttgacaccattttcctgcctcagcctcctgagtagttgggactaccagtagatgggactacaggcacctgccaacacgcccggctaatttttttgtatttttagtagagacggggtttcaccatgttagccaggatggtctggatctcctgacctcgtgatccacccgcctcggcctcccaaagtgctgcgattacaggcatgagccaccgcgcctggccgctttcgatattttctaaactttaattcaaaagcactttgtgctgtgttctatataaaaaacataataaaaattgaaatgaaagaataattgttattataaaagtactagcttacttttgtatggattcagaatatactaaattaactttttaaaacacaacttttaaaaaatgtatcaaaataataaacgtgttctgatatttttaaaataagtgaccttgtgttctttaaccagtccacatctttagagaacaaaaatgtgttatgatattatgggccatgctaatgacctctagaaaacatcagaatatttctggatatttaataatagctttatatatgactaatgctcatttctatgtaattctgtttaatagttgctttaaaggtgaattttgccacatttactttgacagcagtataaggagtgagatagacatgaacctgaatttcaatttaaaatcatggaagagagggaaaaaaaaccagcttaagaaaaatcaactgataaactgcaagaaaaaaatgcaacttacatcacaaaagctaattgctttattatttagagagtacttaaaaattaaagaccaaacttctctccacccaacaaaaatgggcaaaggacatacagctaggtcaccaagaaagaagggcaaataggtggtgagtacatgtaaagatacttgataggacttttgcttagttgaatctttagcaaatctcttttatttcttgggattttgaagaagtaatttttaaaggaggactagaaactaagtgattgggaattggcctttttagaattaaaatttcccattacaagaaaaaaaaatcctgtgttcttttttttttccagaatggagtaggtcagtgagcaatgtgattaataaatatttcaatgtctgtgacttttgatttattttggagacagggtcttgctctgttacccaggctggagtgcagtggtgctatctaggcttactgcaacctcacctgtcactttttaattgcaagaaagctgaaaggtttttttctattatatcagttataatgagaaatactgtatatactaactatgagtaaaatactatattgcctaacttgtattattaagcaattctgctaacctgtgaccttacattttcatctgaaaagcaggggctggacaccaattgccctatgaagctattgctagtcctaacattctttgttttgtttgcttttttggcacacttaagtgtgtactatgaagtttatgatgctttaatgaaattttctgtctctaccattgtaatgagaaaggaataaaatactttattttgcaaatctacttatggaatatagttctgtacctgattgttttcataatccctgtgttgatgtgtaatgccacagacatgctcttgatagtaacaggaaagaaaatcagacacagctaaacataaaggtcagttggctggcaggtgcttagcaggtgtaaatagaggcccattcatgctgctccacttgctcctgaaaagcataatgtaaatacagtatactaattaggaggcaaagaaccatctaacatggttcttttttttttttttttttttttttgagataaagtcttgctctgtcaccaggctggagtgcagtggcgcgatcttgactcactgcaacctccgcctcccaggttcaagcaattcccctgcctcagcctcctgagtagctgggactacaggtgtgcgccaccacgcccagctaattttttgtattttagtacagacggggtttcaccatgttggccaggatggtctagatctcctgacctcgtgatctgcccacctcggcctcccaaagtgctgggattacaggcatgagccaccgcgcccagccctaacatcaaattttaaaagagttggccacagtttaatgacatccctgcacaccagcctccacccatactgcccttcataagccccttaaaggagatcccatagttctaaaccgggtccacaaacacacatatcctcattctctccttttcttctctttggcagtttgacaaaatctttagggggaattggaggaaacattaatctcctaaatcaacttcattcaaagctttggcttcaagttctacccgttaaggcctcaggaagttcattgtcgacattgaactcagtcactaaaatgacctcaaggctaagggatagaccacagctccacttcacaagtaagcttgcaacacctgatttaggaaagtttgctgtgcagacagttgtagctcatccattttacagaccgatctcgatttgtttcctagggtctaaaattatttaaatcaaaatctctcagaaatttctggacatttaataaattcatgctggaggagaactggcagagatatgttaaatgcacttgaccacaagaaccatttatttcatccaatatttaccagctattcattgtacacttactacagattttggcactggagatattataagaaagctctaaccctgacttatggaacttatcccaaaaaataggaaacaaggctcagaaccattcaaatgaagcttcagttaactcaaataaaaattagttttataaatttaatgtgaaagtcttcgagtatattaagaatggcttgattaaccccagggatggaaattttactgattgaaagaaagtttcaataaaataccgatcttcgaatctaatctgacacctgaaactaggaaatcaaacactagccatattttttcttctattctttataataatttttctcatgagaaaaaggtatctttcttccaagcctgaaaataaatggagaatttttaatatctattgatgtggagaaaaataaatagactatctgctttcacaaataagtgctggcattgagccacagaacatgtctgtcatattgctctttcacaccatacattaacaggaataataatttctcctcattgagtttcctatttactatccccttaattatacctcctttaattactgtcatagagtgtctgaattttataatccaagatactaagatgtttatttgatataccaccagactcaatgtcttgtattctatgccaaaaatttgaaaatgtttgggaagaggaaattccgtggtttggtgaacccagaaagtcttcagtacatctcagttatagaactgtattaaatacatttaaactctataattccataagacccattttaggtttatacactaagcatctaattcctcactatcctctcatacaaaccctgtgtaatacaagttctactcccataattctatgaacaaaacaacaattgatacatagatttgatttttaaaatacattttctttaccttattctaaatgtaacatagggtcaacatagaaaaagaaaactgaaaagcacaaggaaagtgaaatatctataatcttaaccattgttaattttgttgtgttccaaattagtgtatgtatatatatatatatatatatagcatttttgttttaataaaaggactgccaaaatgcacatgccaatttggactctgctttttccacttacaatgatatcatagtttctcacatttggtattcttttgcaatacttgctgcatagaattccatcacacaaaggtaactgcctccttattacttttgctagacacttagggtttacattttttacaaaaattataaatctttgatcacagctctgatgatttctctgggaactgagagcctaacacaagtcatttccactttaagacttttaacattctgaaaagttatgttacaaacagagtgctggtccccctgcaacatgctcactcacattggctgacattttaattctttgccaatctgaggggaagagatgtcaactttttttgtttgctcttttaatgccagtcatgttcccttttttttcccccttttaccagtcatactggcttactcagaaccctacaaatcaatcctgctcattcttaattttccaacattgttcctgagattgtttcaccagaaaagttctcccccttatccacttcgcctaacaatttctacccatcccaatcctcctgcatttattgcttccaggaatttggcacttaggacacccttgtccttacattgttcatgcatgtatatttcgtcttcaataaaacatttagttgctcaagggcaagggtcccatagagtctcaatatgctaacggcctggtgttgcttaataatttagattctgacgggtcctctccagggaggggagcaaagggcaaattatcttaggggctgggagtgcagaagccaaacctttgagactgtgaaaagaagacggcgccgagacgattcagtagcaggcattcaagcaagaaaaactcaaatattgttcccaataatgcctgactaatgccaaataccaagtaagggcccaggcagtcctgacagcctgcagtgccccaggataaaactaaccctgaggggtgctagcccacgataaccccctgccagggctctggacacgccctgtctcctcgaaggccaacgggctgcccctgcgcgccgaggccccgccccgcggcccgccgattggccccagccgccccggcgctaagactcaatttcacactacgcgcccaggccacgcccacctgtcatgcggccctggaaactgtgagtttggggattgttgtgtccactaaccggactcagaagggacttccctgctcggctggctttcggtttctctgctcacctccggataaatcacggggtctcccgcgccgctcatggcgcctcccgtccgtctcgagcgtccctttccttcccggcgctttcctgggttgcttctggcggccctggtgttgctgctgtcctccttctccggtaggaccccggggtggattcgcgcgtccgcggcgaggctagagctctgctcagtcagtcgggcaggaggcgcggggcgaagctcactgcacgtcgtgcctgcttgggatagagagcgaggccagggttctccgaggggtgccgtgctcagatcccgggggtatgtggcgggggatgcgggaaccacgcagaagcttgtttggtggcatcgtgtgcgcgggcgacatttacgcaggatctggctgcagttcccaaaagaagcgtgannnnnnnnnnnnnnnnnnnnnnnnnnnnnnnnnnnnnnnnnnnnnnnnnnnnnnnnnnnnnnnnnnnnnnnnnnnnnnnnnnnnnnnnnnnnnnnnnnnnnnnnnnnnnnnnnnnnnnnnnnnnnnnnnnnnnnnnnnnnnnnnnnnnnnnnnnnnnnnnnnnnnnnnnnnnnnnnnnnnnnnnnnnnnnnnnnnnnnnnnnnnnnnnnnnnnnnnnnnnnnnnnnnnnnnnnnnnnnnnnnnnnnnnnnnnnnnnnnnnnnnnnnnnnnnnnnnnnnnnnnnnnnnnnnnnnnnnnnnnnnnnnnnnnnnnnnnnnnnnnnnnnnnnnnnnnnnnnnnnnnnnnnnnnnnnnnnnnnnnnnnnnnnnnnnnnnnnnnnnnnnnnnnnnnnnnnnnnnnnnnnnnnnnnnnnnnnnnnnnnnnnnnnnnnnnnnnnnnnnnnnnnnnnnnnnnnnnnnnnnnnnnnnnnnnnnnnnnnnnnnnnnnnnnnnnnnnnnnnnnnnnnnnnnnnnnnnntccgtgttgcctgagatcgtattggtcttgaattttaagtggctgcttttttggggggtgggtgggccatcgaagtcatcttcctgttcccaaccaatatagacagtatctgattccattgcctagtggctttttgacattgttttccttcttttcattagtttgagtcatatttgagagatgtgaagcaacctaaaaaacactggtagccaaacctagtgagaaattagtatcctaacaaaggaaggcagataatgttaatcttgttttcccctacagctcataaactgaagcttaaggcctatcccactgttctgtatttcattgaatggaatcaatatttttaaaaatgcatgctaggccaggcccagttgctcacacctgtgatcccagcactttgggaggcccaagttgggtgattgcttaagcccaggagttcaagatcagcctggacaacatgtcaaaaccccatgtctacaaaaaataaaaaaattagatgggcatggtggtgtatgcccgtggtcccaactactccagaggctgaggtgggaggatcgcttgagcccaggaggagaagactgcagtgagctgtgatcatgccactgcactccagcctggatgacagtgtgagaccctgtctcaaaaaaaaaaaaaaaaaaaaaaagccaaaaaatacatgcttaaatacaggcttattgtgcaaaatgaacaaaataaaaggacaactgtttttaatattttgttatatttccttctgactttattgtgtttcatgtgtatctatatccaaattatatttaggatcttattccatgtacagattgtacgttgcatttcttctcttaggaacattcattcaacgaatatgggtcttgtatgtctggtgctgttacactggtaggtaataacagacaattcctattttctttatcctttttttactatttgtttacacacgtacatgcaggaagataagcagggactttttttgctcattgttaagtgcttaatgccgggaacacagtaggcaatcaacagatgtttgctaaaatgtattgggagtggcagacattaaccaaaacataatagtaacaaatatattaaccagggaagtgttctggaggaaaggagtataattttctgacagcatttaacaaatgactggggggagggaaggctttgcttctcatcaaacagacaaaactctgccactttggggcatctgtgctttctgttccctcagtcctggaacgttctccccatgacctgctgcataaatgggctgtttcttctgcaagctcagctggaatgttaccgcttcagagaccttcttggaaccccccaactcaggttgaacacatacaacccagttcaagtacctcttgtaatcacccttttaaagtgatcttttctgttctctgtctctccccatcagaatgcaggaatcttctgtcttcccccatttgtggttccaaaagccccatttgtttgcttctgtatgaaccctaactcagtatccatatagacatctgttaaatatcagaaaattaaatatactatttggctggggcttagagcctaggaaaaagtccctcctgcctccaagaggaaggttctttaaagagctatgctcaggatggtctttctgttgtacctaaaaagctagggcagcagcagctgagggccagaaaggatctgtctcccctgtttatgttgactctgcagggcttccagtacttcagtcttgcatctcactgatcattaaaacgttcattttgaaggagggtgatgggattagggagcagtggtgttaagaagaaaacgaaaggacttttttttctttttaaagattaatgtttagaataggcttagtactagaagtacatacagcctgggcatcataaggagagcccacctctacagaatattaaaaacaaaaaattagccaggtgtgatgttgcatgcctgtggtcccagctacttgggaggctgaagggcgtgaagggggaggatcactggagcccccatggtcaaggctgcagtgagccctaatcataccactgcactccagcttgggtgacagagtgagacccggtctcaaacacacacacacacacacacacacacagacacacacacacacacagaaaaaaaaaaaaaacctggaagttgaagaagataatgaaagcaatttgaaatagaggaacatagaattataaaatgaatagggtgcaacatggaagataacaaaactaaaaatgaagagaaggaaaaataaggttaagtttgaggttgatagggttaaatcaagacaggtatgaaacctagagaaagtaaaaatgagaactcacgatgctaggcagagagaatacatgaattaaaataaacattcaatttttggagcaactcactctcacaaagataaggttttgtaagcaggtggtgctgtgcatgggagacctgccctctcaaaggtagttgccaaatggttccagatagcagaaggaaacgtgtcaaatttcaggccagtctcattcattcctccagaagaggagctgcttttttggacaaaacccccgatctcctgttgtgtgtggtctcttctgcctatttcaggtgttttccttattttcaatgaaagaagccaagaccaataagttcttattgcttcttagtttcctcactcggcatactacaatgcaaaaagagcagtccatatctggtcacctgccaggataccagaagactgggagataggcagcacaagaaatggctaaatcttctttctccattgttctgtagaatgattattttcaatatgaaattgattacaatatattcttcacattgttttgtgtttgacagcagtggactttgagtaccaaatttttttcgaatagctactatgagggacatattgtgctgggtgttgtggccacatggatgaatggagtcggccttgttaactattaaactcaaaaacacgtgataattacctgagagatccatgcaggggagagtccaggggaaggtgactgatcactgcttcccagggggaggcagaaaatgcttcttggaggagatgatgggtggattaaagaagacaagagctgagcaggagttgtagctaccggccagggaggaagggtattcagagcagaggaagcaaggtgagcaaaggcaccaagatgtgacactgctggactgccaagctattcagtgtggcagagtagggtaaaggagacaacaaagaagggagaggaataaatcacagggtgagcagttctaaaaagcaacagtcttgtcaggaataaacaatcaccatcgtaaactcagactttgatattattccctgtccttttagggcagcttgagcccttttgtttgacttagcacaacgtgactccaaactagggttgttttaatttcccaagacacagtagtaggcaatttcttgaggacctaattgcagatagagtttgtcggtctcagcatgtgggagctccagatgaatggcagtaatgggaagcagtttggtagtggttcagcagtgtggcctgggaacctagttgactggcctgcctcctgggtctgccaacctaactggaatgtattcttgggttctgattgtgatgggatttaaaagtctctaagctatgttaggaagccttagacattatcctgaggtcattggagagccatcgaaaggtatctgtcttggaaaaaccttgattaccctgtcatataaatactgctctggtaatgtgaaaaatgaattgaatgaaaggtggcaagataggtatggagacctatttggttatgtcgtggtaatccagataagaaatgatagtggcttgaatgaaaagtaaaggatacaactacatagaataaacgggcatttcagttgtggaaacataacttgtttggggggcgtgtgtgtgtatgtgtatgtgtgtgtagagtcaaaagtggctcttgggtctccctttgttgtttgagctagagtgacacattccaagtagagctgtgtggggaggcaattgaatatgtagttttggcaccccagctagagatctgggatggagagatacccagctagga

SEQ ID NO: 1196 - DNA, 4254 bp, Homo sapiens
aaatctggtttgtagatgtgcttggggagaatgggggcctcttctccaagaagcccggagcctgtcgggccgccggcgcccggtctccccttctgctgcggaggatccctgctggcggttgtggtgctgcttgcgctgccggtggcctggggtcaatgcaatgccccagaatggcttccatttgccaggcctaccaacctaactgatgagtttgagtttcccattgggacatatctgaactatgaatgccgccctggttattccggaagaccgttttctatcatctgcctaaaaaactcagtctggactggtgctaaggacaggtgcagacgtaaatcatgtcgtaatcctccagatcctgtgaatggcatggtgcatgtgatcaaaggcatccagttcggatcccaaattaaatattcttgtactaaaggataccgactcattggttcctcgtctgccacatgcatcatctcaggtgatactgtcatttgggataatgaaacacctatttgtgacagaattccttgtgggctacccccaaccatcgccaatggagatttcattagcaccaacagagagaattttcactatggatcagtggtgacctaccgctgcaatcttggaagcagagggagaaaggtgtttgagcttgtgggtgagccctccatatactgcaccagcaatgacgatcaagtgggcatctggagcggccccgcccctcagtgcattatacctaacaaatgcacgcctccaaatgtggaaaatggaatattggtatctgacaacagaagcttattttccttaaatgaagttgtggagtttaggtgtcagcctggctttgtcatgaaaggaccccgccgtgtgaagtgccaggccctgaacaaatgggagccagagttaccaagctgctccagggtgtgtcagccgcctccagaaatcctgcatggtgagcataccccaagccatcaggacaacttttcacctgggcaggaagtgttctacagctgtgagcctggctatgacctcagaggggctgcgtctctgcactgcacaccccagggagactggagccctgaagccccgagatgtgcagtgaaatcctgtgatgacttcttgggtcaactccctcatggccgtgtgctatttccacttaatctccagcttggggcaaaggtgtcctttgtctgtgatgaagggtttcgcttaaagggcagttccgttagtcattgtgtcttggttggaatgagaagcctttggaataacagtgttcctgtgtgtgaacatatcttttgtccaaatcctccagctatccttaatgggagacacacaggaactccctctggagatattccctatggaaaagaaatatcttacacatgtgacccccacccagacagagggatgaccttcaacctcattggggagagcaccatccgctgcacaagtgaccctcatgggaatggggtttggagcagccctgcccctcgctgtgaactttctgttcgtgctggtcactgtaaaaccccagagcagtttccatttgccagtcctacgatcccaattaatgactttgagtttccagtcgggacatctttgaattatgaatgccgtcctgggtattttgggaaaatgttctctatctcctgcctagaaaacttggtctggtcaagtgttgaagacaactgtagacgaaaatcatgtggacctccaccagaacccttcaatggaatggtgcatataaacacagatacacagtttggatcaacagttaattattcttgtaatgaagggtttcgactcattggttccccatctactacttgtctcgtctcaggcaataatgtcacatgggataagaaggcacctatttgtgagatcatatcttgtgagccacctccaaccatatccaatggagacttctacagcaacaatagaacatcttttcacaatggaacggtggtaacttaccagtgccacactggaccagatggagaacagctgtttgagcttgtgggagaacggtcaatatattgcaccagcaaagatgatcaagttggtgtttggagcagccctccccctcggtgtatttctactaataaatgcacagctccagaagttgaaaatgcaattagagtaccaggaaacaggagtttctttaccctcactgagatcatcagatttagatgtcagcccgggtttgtcatggtagggtcccacactgtgcagtgccagaccaatggcagatgggggcccaagctgccacactgctccagggtgtgtcagccgcctccagaaatcctgcatggtgagcataccctaagccatcaggacaacttttcacctgggcaggaagtgttctacagctgtgagcccagctatgacctcagaggggctgcgtctctgcactgcacgccccagggagactggagccctgaagcccctagatgtacagtgaaatcctgtgatgacttcctgggccaactccctcatggccgtgtgctacttccacttaatctccagcttggggcaaaggtgtcctttgtttgcgatgaagggttccgattaaaaggcaggtctgctagtcattgtgtcttggctggaatgaaagccctttggaatagcagtgttccagtgtgtgaacaaatcttttgtccaaatcctccagctatccttaatgggagacacacaggaactccctttggagatattccctatggaaaagaaatatcttacgcatgcgacacccacccagacagagggatgaccttcaacctcattggggagagctccatccgctgcacaagtgaccctcaagggaatggggtttggagcagccctgcccctcgctgtgaactttctgttcctgctgcctgcccacatccacccaagatccaaaacgggcattacattggaggacacgtatctctatatcttcctgggatgacaatcagctacatttgtgaccccggctacctgttagtgggaaagggcttcattttctgtacagaccagggaatctggagccaattggatcattattgcaaagaagtaaattgtagcttcccactgtttatgaatggaatctcgaaggagttagaaatgaaaaaagtatatcactatggagattatgtgactttgaagtgtgaagatgggtatactctggaaggcagtccctggagccagtgccaggcggatgacagatgggaccctcctctggccaaatgtacctctcgtgcacatgatgctctcatagttggcactttatctggtacgatcttctttattttactcatcattttcctctcttggataattctaaagcacagaaaaggcaataatgcacatgaaaaccctaaagaagtggctatccatttacattctcaaggaggcagcagcgttcatccccgaactctgcaaacaaatgaagaaaatagcagggtccttccttgacaaagtactatacagctgaagaacatctcgaatacaattttggtgggaaaggagccaattgatttcaacagaatcagatctgagcttcataaagtctttgaagtgacttcacagagacgcagacatgtgcacttgaagatgctgccccttccctggtacctagcaaagctcctgcctctttgtgtgcgtcactgtgaaacccccacccttctgcctcgtgctaaacgcacacagtatctagtcaggggaaaagactgcatttaggagatagaaaatagtttggattacttaaaggaataaggtgttgcctggaatttctggtttgtaaggtggtcactgttcttttttaaaatatttgtaatatggaatgggctcagtaagaagagcttggaaaatgcagaaagttatgaaaaataagtcacttataattatgctacctacctgataaccactcctaatattttgattcattttctgcctatcttctttcacatatgtgtttttttacatacgtacttttcccccttagtttgtttccttttattttatagagcagaaccctagtcttttaaacagtttagagtgaaatatatgctatatcagtttttactttctctagggagaaaaattaatttactagaaaggcatgaaatgatcatgggaagagtggttaagactactgaagagaaatatttggaaaataagatttcgatatcttctttttttttgagatggagtctggctctgtctcccaggctggagtgcagtggcgtaatctcggctcactgcaagctccgcctcccg

SEQ ID NO: 1197 - protein, 1144 aa, Homo sapiens
MCLGRMGASSPRSPEPVGPPAPGLPFCCGGSLLAVVVLLALPVAWGQCNAPEWLPFARPTNLTDEFEFPIGTYLNYECRPGYSGRPFSIICLKNSVWTGAKDRCRRKSCRNPPDPVNGMVHVIKGIQFGSQIKYSCTKGYRLIGSSSATCIISGDTVIWDNETPICDRIPCGLPPTIANGDFISTNRENFHYGSVVTYRCNLGSRGRKVFELVGEPSIYCTSNDDQVGIWSGPAPQCIIPNKCTPPNVENGILVSDNRSLFSLNEVVEFRCQPGFVMKGPRRVKCQALNKWEPELPSCSRVCQPPPEILHGEHTPSHQDNFSPGQEVFYSCEPGYDLRGAASLHCTPQGDWSPEAPRCAVKSCDDFLGQLPHGRVLFPLNLQLGAKVSFVCDEGFRLKGSSVSHCVLVGMRSLWNNSVPVCEHIFCPNPPAILNGRHTGTPSGDIPYGKEISYTCDPHPDRGMTFNLIGESTIRCTSDPHGNGVWSSPAPRCELSVRAGHCKTPEQFPFASPTIPINDFEFPVGTSLNYECRPGYFGKMFSISCLENLVWSSVEDNCRRKSCGPPPEPFNGMVHINTDTQFGSTVNYSCNEGFRLIGSPSTTCLVSGNNVTWDKKAPICEIISCEPPPTISNGDFYSNNRTSFHNGTVVTYQCHTGPDGEQLFELVGERSIYCTSKDDQVGVWSSPPPRCISTNKCTAPEVENAIRVPGNRSFFTLTEIIRFRCQPGFVMVGSHTVQCQTNGRWGPKLPHCSRVCQPPPEILHGEHTLSHQDNFSPGQEVFYSCEPSYDLRGAASLHCTPQGDWSPEAPRCTVKSCDDFLGQLPHGRVLLPLNLQLGAKVSFVCDEGFRLKGRSASHCVLAGMKALWNSSVPVCEQIFCPNPPAILNGRHTGTPFGDIPYGKEISYACDTHPDRGMTFNLIGESSIRCTSDPQGNGVWSSPAPRCELSVPAACPHPPKIQNGHYIGGHVSLYLPGMTISYICDPGYLLVGKGFIFCTDQGIWSQLDHYCKEVNCSFPLFMNGISKELEMKKVYHYGDYVTLKCEDGYTLEGSPWSQCQADDRWDPPLAKCTSRAHDALIVGTLSGTIFFILLIIFLSWIILKHRKGNNAHENPKEVAIHLHSQGGSSVHPRTLQTNEENSRVLP

SEQ ID NO: 1198 - DNA, 26385 bp, Mus musculus
  misc_feature (1)...(26385): n = A,T,C or G
gtttcctgattttagttggattttttttctcccaggtttctgcagtgtccccaccccccacccccattttctcccactcttacccaagagccttaactcttccattgtggattctactttcctcctgattccagtgatcttcagggtcatggcagccttggagtatcaggctgctgttcccaatgtgggatgcagagggcactgccagcctggttatcacgcaccactgtcacacagggaagcgcccccttcccaggatcttaatatttctcctctcttctatttcacagaggagatgcttggtaaggcagtgtcttcaggtcccaggtccctgctaataaatgaatccatgttaaagccacattcccaggaactgggataccgtgtttgcctcgcttgcatgaagccctagtttggatcaccagcactgcaaaagccaggaattggtggcgcatgactgtaaccccagcacttgggaggcaggaagatcagaagttcaaggctattcctcacctcccagcattctgtagacactctcaaaaacccaaagcaaggcctgtggtggtgcaagccttcaaccctaacacttggaaggcagaggcagatggatctctgtgagttcgaggctagcctggtctacattgagagttgcagggcagccagggctacatggagaatccctgactaaggggacaaggaagcacttgctgccaagcctgaggatatgagtccccgagcgtcgctggatggaaggagagaagactgacctctgacctccacaggcatccagtgtcccatgcacacacatgcacatgcagacaaagtaaataagaaaacaaattaaatgtaggctggacggatagatggttcattggttaaggggacttactgctcttccagaggacctgaggtgtttcccagcacccaggtcaggcagcttataactgtctgtaactcctgctcctgctttctccaaggacgttcccacacaaatgtgaatacgcatatgggcataaacaaaaagctacaaagtgaacctttaattttttttaatgtgtgaacaaaacaacaacagcaaacaaaacaaaacaaaacaaaaaaaaaaaaagaaaggcctccccaaaacaaagaagacccagcagatgaaagaaagtgtttgctgagctgggcgtggtggcacacgcctttaatcccagcacttgggaggcagaggcaggcggatttatgagttcgaggccagcctggtctacagagtgagttccaggactgccaggcaatacagagaaaccctgtctcgaaaaaaccaaaaaccaaccaaccaaccaaccaaacaaacaaacaaacaagtgtttgctggcaagccaggtgagctgcgcctcatccctggggcccatgtgatgaaagcagagacctgattctaaacacttgtcttttgatctccatgagcttgcacacttgctcacatacaatacacacacacacacacacacagatgcacacacagacatacacacacacatacgcacatgcacatgagcgcacacgcatgtacacacatgcaggcacacatacaataaaatataagaagattgctccaaacatgagacaaccctgagatatgtagaaagatcccatctcaaacaacaacaaaataataactaatgaaaaatagaataaacaatccccaggccaactctgtgtgggggcacatgcttgccagtcccagaacctggaaggctgaggcaggaggattaaaaagccttggggacaccaggcttggtggcaccggtcgtaaatccagcacttgggagttaagaagcaagtgagtcacatctgtgagtctgaggctatcttggtctacgtaaccagttctagtatagccagcctgggatacatagtaaccagttctagtatagccagcctgggatacacagtaaccagttctagtatagccagcctgggatacacagtaaccagttctagtatagccagcctgggatacatagtaaccagttctagtatagccagcctgggatacatagtaaccagttctagtatagccagcctgggatacatagtaaaatcttatctcaaagctaaacccaaacccagttgttattttttgcttttttgttttttgggggtagaggagtcttattggtttgattatttggttttctgagacagagtagccctggctgtcctggaacttggattgtagaccagactggcctcaaactcagacatccgcctgcttctgcctcctgagtgctagcgtgtgccaccaccgctagacttatttttttaatgtgttttgagtattttgtgtgcatgtatgcacatgtatcatgcgcatgcagttcacgcagtggccagaagagggcttcagattccctgagccactatgtgtgtgctgggaattaaacccccacccctctgcaggcgctcttaagtgttgagccatctttctagcctggttggttttgatttttgtttgcgtatttgttgctataaggtcttatgtagctcaggctggcttcaaattaaagatacggtcttagctagccttgaacttctgacctctcttcctccagtcctccagtggagattaggggcatgttccctcccccagacctgacagcccctttgaactcaaagcctatgcacactctttctgcatcgtcagtggctcagtggctgcctgatatgcagcagagcaggctggggtcccttttcagagttgacacagaaagaaagtgacttttaggtctggcctgccacctttttggcaccttttgtttccatctcgtctgctttttaagtatgatttctgactaaactccctgagtctgactctaaaagagcttgactctcagaatggatcagcctttcccgccaagctatactctgaggaagaaatgactgatagatttagttactgttcctggggcacttgtgtttaatttaaaatgtttaaagatttatttgtttattttatgtatatgtgtactgtagacacaccagaagagggcatcggatcccactatagatggttgtgagccaccatgtggttgctgggaattgaacttaggaccctggaagagcagtcagtgctctctcaacagctgaatcatctctccagcccttaatttaaacatttaatcactttgtgtgtgtgtgcctgagtgtctgtgtgtgtgtggagagagagagagagagagagagagagagagagagagagagagagagagagaataagcaaatgagtgagactgctatagcatgcataatcagagaacaacttacaagaattgattctctctttttagtacaaaggttccatggatggaactcgagtcgatagatttggtcacaggtcccataactttctgagtcatcccaataggtgtgaatgtgtttagaacaagatgtacatcaacccaaatgaagcttggtggagtcttaaaaatgataaatttattttcattttatgtgcattggtgttttgcttacatgcatatctgtgtgagagtgctggatcctttggaactggagttatagatagctgtgagctgccatgtggttgctgggaagtgaacccaggtcctctggaagagcagccgatgctcttaaccgatgagccatgcctctagctgctgagatattttattttattttattttattttattttattttattttattttattgttaatggaaatgtctttcccaggctctctcttagcctagaactctgcttcctccaaagatgaatttctgaggtataatatggaatggcctagcttcctacacatgtccgtaagctaggaatttctccacatagtaccctgcacagaaggctcaagggaatgagcactatagatgggtcgcctgactttgtccctgagaaattcctcatcactgaggcctgggtcactctgatgatttgaatatgcttggtccaaggagtaccgctattagggggtgtggccttgttggagtgggtgtggccttgttggaggaagtgtgcccttgtgcctgtgggctttaagaccctcatcctagctccctggaagccagccttctcctgtttgccttcggaacaagatgtagaactctcagctcctcctgaaccatgcctaacatgttcctgccttgatgataatggactgaacctctgaacctgtaagccaggcccaattaaatgttgtcctttgggctggagagatggcttcgtggttaagagcactgactgctcttccaggggtcctgagttcaaatcccagcaaccacatggtggctcacaaccatctgtaatgcgatctgatgccctcttctgatgcgtctgaagacagggacagtgtactcacatacataaaataaataaataaatcttttaaaaaatgttgtccttataagagtttgccttggagccgggtgtggtggcgcacgcctttaatcccagcactagggaggcagaggcaggtggatttctgagttcgaggccagcctggtctacaaagtgagttccaggacagctagggctatacagagaaaccctgtctcgaaaaaccaaaaaaaaaaaaaaaaaaaaaaaaaaaaaaagagtttgccttggtaatggtgtctgttcacagcagtaacaccctgactgagacctttcacacatgtacctttcttgatctctggtggtggaatgcaatctaagacagggaaaccctattatctatgagtaccgctgctgaagtggggacagaggggagagaatggctgtcaccacgatgcacactcaacaacccctcacactaataataaataaattaaaaatgaaaataagatgaaaactaaaaaatatatagggcaaagagaaatagaggaagacacccatccccacctctggcctttgcatgtgctcacacacgtatgtgtacatgcacacacacacgcacacacgcacacacacacaacttacctagcatatgtgaggtcctaagctttaccataggtatggtaaaaataaagagaagataaagccatgttcactgacgtgtatagtcctatcacttgagaagcagaggtcagagttcaatgtcatatttaactgcatattgagtttgaagctagcctgggttacatgtggctcaaaacaacaacaactgaagaaaaagaagaagaagaagaagaagaagaagaagaagaagaagaagaagaagaagaagaagaggaggaggaggaggaggaggaggaggaggaggaggannnnnnnnnnnnnnnnnnnnnnnnnnnnnnnnnnnnnnnnnnnnnnnnnnnnnnnnnnnnnnnnnnnnnnnnnngggaggaagaggaaggctagagtacacccagtttaagctggccaccttggcctagtcaaactcacttggcaaactatatggcttcatgcttcctattatatttatttaatgtatatggatgtgtgaccatgcaccacttgtgtgtttgctgcccatggagtccagaagaggatattagatcccctgggactggagttacagagggttgtcatcaccatgtggtgctgggaaggaatcgaaccttggtcctctggaagagcggtcagtgctcttaaccactgagccatctctccagttctcttgattcccaactatgactttggatatgaactcttgttgtatacctaacacttaaattcctcaaaattcacatggccaccactgaattcttaatctctccattgcctagtttgctctctttttagtcattctcacctcagtgaatgacagctctgacctttatcttcatggcaaaaaaaaaaaaatctttgaatcaggagtagcctctgcaggcaccaggcaccaggcacacacacacacacacacacacacacacacatatatatggaccttaattttaaattgtgtatcaaccttggcttatctgtttcacacctcatgtgaggctatcagcaaaccctgactctcagtctgtaaagcacacatctccagcttctcccttctagcctacagccttctctccaactgcagttcaaactaccctttctgaaaacaaagctgggcttgagagatggcccaggagttaagagaatatacccggccttacagaggacctgattcaattccctgctcccacttcaggtagctcacaactgtctgtaactccagcacctctggcctccaaacacagaaccgaacacaagcaattttaaaagtaaacaaataaaaattaatttccctgatcacatctttccaatgattccttatctcactccaaacccaaaatcttgacagtaactagcaggcctctccaggtctgaccctgttccttcttaggtcttcaggttcacaaccaaccaaatcttcccttgtgaattactcctttattgatctttctgacccttccaacataccaagcatgttcctttgtcaaggtctatggacatttctgtcttttggaatgttcctcctttagatatcttggggttttgttgttgttgttttgttttgaggcagtcatactatatagcccaggctggcctggaatttaccatgtatactaggctagccttgtagcctggaattccctcagctccacttgtctctacctttcttgtattcaaactaaaagcaaggcccatgaactgcctgccactcctagctctggcctcaaattattttttaaaattatttattagatttgtttttctttgtagttcaaatgttttgcctgctcgtatatatgcgcaccacactcatacatattgattcccaaggaaccaaggttatgaatggttgtgagccaccttgtgggcgctggggaattgaacctaagtcttctacaaaagcaacaagagctcttcgatgctgatctgtagatctgctctcctggaattcttgatctccctccctcaacttccttattctaggtatatgggacagggggcggcttgctgtcacttttggctacagttaactaaagaattgaagtagaaactctgtagcaaaacacaggccttggaatagatctaggagggaggcggtgggggagggtgaaagctttgcttagacgttgggatagagagagagagagagagagagagagagagagagagagagagagagagagagaacattggagcagagctctgagttcttgggcaagcctttgaagcccaggcaggcgctaccccctcgggctgggagggtgtaacccatccatcaacctatagtagacaagggggtaacattctgtcttgggtgagtcagaagactccttggggctactactgaatgtgggggcttctctggagtccagtagttcgtctgcaacatctctggcgcctctgggtggtggccttcggtgctgcagtggaagaccggtgaggtggagggaggcgtacagctgagctcaccgccgcaggcgcatccatccctccagggcctataatttgggttccctgggctggccgcccctatcagcggcttagcaacagatgagtcacccaagaccccagccaaggcaaacatcaggggagggggaggaggaggagattcccgagtgtagcccggctttagccaccgcctcagttgcttgatttccccatctccagaggtccccactcttttatttgacactccccgcccttcagggcctcgttgttcttcccacagtgttttgctacacgtcccccctccccatccccgcaagggccggaggggccttccacttttctcatcaaaaggaagatgggccaggttgctctcatttcctccctgcagtgatggcagccccccttttttccccctctcatctaggtctcaacccttgtcaaggtctctctggttcctgcccctcctctttcttggagctggctgcgtgcttggggtattaggcaatgggtgtgcacccgcaggcctctccaggccccgcctgtcccaccgccctctagctgcctgtgggtcagtgctcaggccagacggtcggcaagagggcaccctcggccagctcaggccacccactgcctgcctgtggcctcttatcaaagagcaagacttcagagaggttagagaacagcggtatgagttcttaggtttgggacagttcaacttggggagcccccaggccactaagaagttgaacctctgggcgctataatcttccttagccccttcatcatcatcatcaccttcgtcgttattattattattgtcgttgccgctgtcgtcgtcatcatcatcatcatcggttttagagacagggtctctttatatagcctggctgtcccagaactcactacatagtagaccaggctggccttgaattcaaggagatccacctgcctctgcctcccaagtgttgggagtaaaagcatggcgcgcgcgcgcacacacacacacacacacacacacacacacacacacacacacagctctacctgccccagcttgccctagtcccttcttgacatctgactgaatgatagaactaggaggtaaagatagcattagggacaaataggaacaagacaaaatccaacgtgtgaatggaactgcagccacgggagaaacgtgaatatcctcgagatactgatgaaggatctgctaaatacccttccagggcctgggtgagtcccaggctgacaggcaggagagaggatggggcactggtgaggatcctgggttctggagtagggtagaagttactgagacagtgctggcccatctcagaagttatacatggtttggccttcttcccctaaatgggaaggagctcttgggctgccttttccctactccagaggtgggggactcagaaagagcacctcccgctgtggtctagcttagggctccagcaccctcatcaaggaagcactcaatagtaaccccagatacctaacttcctttgtactagacacctagccagggatgcctcttcaacacaaggcaagacttgcaagaatgtagaccaggggctggttgcccagccttgctgctagccaccaccaatgaagaggtggttgtggctgtgggtaccagccctgtgcttctgtttccttggggggtcggctctggatctatgtgacttgggtgcgcagggccagtcatgctgtgcttggggctgcggtctggcagggggcggggggggnnnnnnnnnnnnnnnnnnnnnnnnnnnnnnnnnnnnnnnnnnnnnnnnnnnnnnnnnnnnnnnnnnnnnnnnnnnnnnnnnnnnnnnnnnnnnnnnnnnnnnnnnncccccccccccccccgctatcctgaagttgggctcactttgggatcctctcaggcctccctcatctcttgtgcagcaaacgcgcgagcgtggagcatgcatttgggttatctcaagcattcatccaggaattccggagaggagacccctgagatctcggatgcctaccagaaaaggggagcatagggactgacaggaggtcttaggagctacccgagcttttgaccaaggccaaattctgaggccaaacctgagccctcccaaggggcaggcgtaaggctctgaggtgggcgggagccaagccacacagtggctcctcacttgcaggctcagagtgccctggtgcgcacaggctcgtgggctcttcaagagaccgtcagtaaccctaaggtcgtctagatccgtcctcagcgtgtcaaaggagcgcttcaatcacccactctcggaggcaaaggaaaacgatgaaagaccctgtcattgggaccagatcctggtcccttggggtcaccgcactctccctacagcctcgggagaccccggagcaggtgagtggaactccgaccacttgcccctggagtggggctaatcgtgatcccggcgtcctgtgtgtgtgtgtgtgtgtgtgtacacgcttggggggggagcggctgcgttctcctggtcaagtcagggggtggggtgcgggtggggtggggatgccccgggctctgggaggggccgcagttccgtcagctcgagcagaaccacccgtgagttaggtcgagcagagccaaagcccccggtgcttcgtcgcgggttcgctcgctagctatctggatcactccctcccttttaccctcccttcctcccggcgggcggccgcggcgacgccggggaagcggcagagaggagtggctgggcgctgggagaatgctgctccgccgagggggctgaacccgacagtttccccacggtttaagccccaagagccgggcccgagtgactcaaccgcgagccttgtggatcctgcacctgaaccgctggaggtaatggggcgggagagaacagggagggcagagactagacaggcacgcgggcggtcagacaagacagacagacagacagacagacagacagacagacaagcgtcccccctcaagagcacagacaacgccgagaaagccagatatagagatacctacagaataaagaagtgccttcggattcagagggcaatgagggggtggggtagaattggggtcggacccttggggactagatggtgtcgcactgcagagggagcgtgtagttagaaaaggggcgggggtagatggggaatctgtggccttggcgcagggcacctggtttccctcggggcctttgtagcccactttccccctggtgggagccgaggccagagagtggttccaagagcctgacctcggacccttctaatctagcttgcctggtattgccagcacgaggaggcaacacccctccaggtggtggggaacccccttctaatccctccctctaaccctgtaagggcgggcagatcagttgtggggcccacagagagggagcggttggtgaggagggatagagggtctgagagaaccggtctcaaatgggtatgtgagtgtcccaggaccctgcgtcgtgtctggctggctcggactccaggggtgctccggagggcctcgggctgctcagacccttcctctttgacaggttccaggacgcagacactggaagtcaaggggtgactagtattgcacagtttggggaggggtgagaaaaagctagtggggcttcattggtggcttaaggagctgaaacagagcgtccttcggtcccagggagccaatctagtcctcatcaaatgtccctgtccccgcaggcgctgactgactcgcccaccggagcctccgggcttcgacatgctggaggagccccggtctcggcctccgcccttaggcctcgcgggtctcctgttcttggctttgttcagtcggtgagcgtttttttatccagttccaggggagggaaagcaccgatctgggttagggaggatagggatggggcgtgcgactagaccccagacccttgtcgcttgtccccagggctctaagcaatgagattctgggccttaaacttcccggtgagccgccgctgacggccaacaccgtgtgcttgaccctgtccggactgagtaagcgacagctggggctgtgcctgcgcagccccgacgtgacggcgtcggcgctccaggggctgcacatcgccgttcacgagtgtcagcaccagctgcgcgaccagcgctggaactgctcggcactggagggcggcggccggctgccgcaccacagcgccatcctcaagcgcggtgagcctgacggggcggctgtgtgtgctgctgcccaggcgcggggggcaggccgaggcgcgcggaggcgggaagggaccggctcacggcttcgggaggggcctctccgggaatttccccaggagctgcgctcagctagatctggtcaccggctgggcctctgcctgcctgcctgccttccacctgcgtcgctggcgaggcagctgggtccctgcttccctaccccagggcctcccttttctgcctccacctaattcggatctgggatgcacctgtgaacaagagatgccccccaacccaagaagcttcaaacacaccccccctcaaccccctatttttctctcccctccctctccacccagacaagtccaggctggtgtccccagagtctcagcgggggtggggtgacgcccccaaccgtttaagggttaaacctgctcccctaattgctggggttcccaggagccaaagctgggaacaaagaccctgatggctttgaagctggggagtagccccctcctctgtgctgtgggggccccaggtgtccctcacctgaacaggtgaggaatggctggagggccacaaaacaggtcactgctggcctggtctagaaggaatggtccgggaggctccattgcctctccctatactcaactgaagtttactcccagaggactaatgatccacggaagggggtgggggtgggctcagtccagggatagagtagtgctttggggactatggggttaataggcagctgccatctggaggggaattcccaagacgtgtgcaaacagcttcacccttggatggttgggggatcttggggctggccctggagccctagattcccgggtaagaggggcctggcctccaaaccaactgtctttcatcttctcagaactcttgcttgcaagtgcccttgcttaaaatgaaacgagggacccccctccttctctgcagggcctgatatagtggaaggttttgatggtgaggatgtctctctaagcctgggaaagatttgtcatcccaagccccgtcctcaatgaccgccccccccccaaacataacagagaagccaaccttttaaaagggccttggggaaaatcactcctgactttctcctcctcccagtattttataaggtaatagcaggttagaataaacataaagggcaaatataaaactagaacctgggaagggggtgggcagctccagcatgctaggggttgttactgcagtggtaggtggtagtgtggtttaaagactcatttaataaggtgggggaagaaccccaaagccaaaggtgccccccaagctccctgcagagagatgcagaactcctggaacacaccttcagaagtcctcaggactctttctgaattatctcaaatccagaggtctctctaggcccgtggttcttaacctctctggagggctgagaggatattcagtgcctgagggttgatcttggggtggtcaaaagtcagatatcctgcatatcaaatatttacattatggttcacagcaaaattgcagatatgaagcagcaatgaaataattttatggttggggtcatcacaacctgagggaacttgtattatagggttatagctttaagaaagttgagaaccactgtcacaccccaaaatgacagatttacagagatttggctttagtggtatcttgacccatgggtctgaggcctggtgttatttcttgtctcaggatgctgtcccaaatcactcagctgataaatgacagagtcaggactcagaaatttctgacattggctgctgctactagtggtagttcacacctatgcgcttaggaagctgaggcaggagaattgtcaagagttcaaggccagcttgggctacatagaagatccaattggattttttttttttttttttttttttgctattagagggtggctggtgtctctttctcagcctgccatctgccttctcccctcagctccctgtcaaccttaccccaatccattttctccccaggtttccgtgagagtgctttctccttctccatgctggctgctggggtcatgcatgctgttgccacagcctgcagcctgggcaagctggtgagctgcggctgcggatggaagggtagtggtgagcaagaccggcttagagccaagctgctgcagcttcaggcactgtctcggggcaagactttccccatctcccagcccagccctgttcctggctcagtccccagccccggcccccaggacacgtgggaatggggtggctgtaaccacgacatggacttcggagagaagttctctcgggatttcttggattccagggaggctccccgggacatccaggcgagaatgcggatccacaacaacagggtgggacgccaggtgtgtgtgcttacctcggcctgggtctccttccggttccgagacagccttgctgtgagacagccttgctgtgtagtacaggctagctttagatttggaatcctcccagtctgagggctgtggctgttaggtgtggccaccgagccaggcttttctcagactttctctgtccctccctccctccctcctaaagagaggccccacagagtaatgggatgaggtttggtgagtgattttgttactagcaagcttgtcgctagtagtcacccgaaatatgtttagaatctataggaagctgcctggtggcatttaccatatgtaaatgctagcatatagcatcttagtttttttttttttttttttttttttttttttttttaatttaaggtgtatcagtgctttgcccgaatgtataggtctgggcaccatttgtgtttttggtgccctcagaggccaggagagggctttggactccctagaactggggttattgtctttttttaaatatttatttatttatttatttatgtgagtacactgttgttgtcttcagacagcactagatgaaggtattcattccatcccattacagatggttgtgagccaccatgcggttgctgggaattgaactcaggacctctagaagagcagtcggttattgttgtgagtcaccatgtgggtactggaaattgaacccaggtcctctgggagagcagcagccagtgctcttaactatctggtcacatctccagcccctcatatactgtattctatacagtgccttgtacttggctcactgcatagacattggtttttttgttttgttttttgagacagggtttctctgtgtagccctggctgtcctggaactcactggcctcgaactcagaaatccgcctgccttgcctctgcctctgcctccgcctcccaagtgctgggattaaaggcgtgtgccaccacgccccgccccgggtactgcatagacactgttacaacagctgccttgcctgacagactttaggacattctggcctacagactccattttatccatgtttattctggaaagcgctgttgtctccttgtgagctagtgatcaaagtaaatgctttcctttccgttcccttccttgctctgttcatttgcaccccctcatcgttcccctctttgtcaccctgacgttgtaggtggtaacggaaaacctgaagcggaagtgcaaatgccatggaacgtcaggcagctgccaattcaagacctgttggagggcagcgccagagttccgggccatcggggcagcactgagggagcggctgagcagagccatctttatcgatacccacaaccgcaactctggagcgttccagccccgcctacgtccgcggcgcctctctggagagctggtttactttgagaagtctcctgacttctgcgagcgagaccctactctgggctccccaggcacgagaggccgggcttgcaacaagaccagccgcctcttggatggctgtggcagcctgtgctgtggccgtgggcacaacgtgctccggcagacgcgagtggagcgctgccactgtcgtttccactggtgctgttatgtgctgtgtgatgagtgtaaagtcacagagtgggtcaatgtgtgtaaatgaaggtgagcctcgcctaggcacgacgaggaggagaagcactgtgtgagggctgctctctttcagccctttgctcggatttctgtctagggtttatcgtggctcccggaagctcagagcatctgcctgagaacagctctgggggtgtagggtcaggtgaaatctgtaacgagcagccttttgtgggggaagtggccccacactctgttcttaaacactcgaatagactaagatgaaatgcactgtactgttagcgtcttctctacctacagctccctcgggctcaggttcctacttcctttggatagggagtctatcttttggccactcctcttcctcgaaggataatagcaggcattgtgtggagtcaataagacccgtatatatagcaagagaccacctcttcctatttgtggttctcaaactcctccactacagcccagaacctcctcttatgggacctcgggtgacaataatgagaggttttcggttggaaaaggacagagggcagggaagcctcagacagctgtcttgtcaggctcttgggaggcttctccttccgttcagttgttgaaagggtctctccaaaggaaaggttttagccataactcttggaggcccttttccttcttcagcaggaagggtgggaatggataatttattttactgagatgtgttcttggttcctgtttgaaactaaaataaattaagttactgaactactggactggcagtggcagatggtgatatgtctagccacactcggggtagtagcccgtgtttttttctctttctaggtgaagtctacactcctgtactcagtgactttttatgtatatcctgctgacttccacaaaggatttgaaatgatgctcaaagactgagtttaggtttttagtctgtacaaaccaaggtggacttctgggtgtgaaggacttttagattcaaatgtacatagaccctgttcaccccgagccctaggctccagggtcaccttcaccattactcagaaccaaagctggtgcttgtctcccctgtaaagggctagatggtagatacactaggctatttatactgtggtctctatgtcgacaactcacctccaccgtacttacccagttctgctgttatagaccccaaatagttatggcagggggtgaatgaaagcagacacagacctcacataagcggatggggatagctgtgttcaacacagctcacaaagctggtgtgcagggccagaccttgccctccgactgtcacttattgaaccctttgctatactacaaggtcatgtctgcaatgggagtttcagaacttaaacttaacaattaggtggacaattaaaggacaggtactgttgtctctaagtccaaaccagagaattgggcaggggttgggggctggagggtgggggtggggtggtnnnnnnnnnnnnnnnnnnnnnnnnnnnnnnnnnnnnnnnnnnnnnnnnnnnnnnnnnnnnnnnnnnnnnnnnnnnnnnnnnnnnnnnnnnnnnnnnnnnnnnnnnnnnnnnnnnnnnnnnnnnnnnnnnnnnnnnnnnnnnnnnnnnnnnnnnnnnnnnnnnnnnnnnnnnnnnnnnnnnnnnnnnnnnnnnnnnnnnnnnnnnnnnnnnnnnnnnnnnnnnnnnnnnnnnnnnnnnnnnnnnnnnnnnnnnnnnnnnnnnnnnnnnnnnnnnnnnnnnnnnnnnnnnnnnnnnnnnnnnnnnnnnnnnnnnnnnnnnnnnnnnnnnnnnnnnnnnnnnnnnnnnnnnnnnnnnnnnnnnnnnnnnnnnnnnnnnnnnnnnnnnnnnnnnnnnnnnnnnnnnnnnggtgatgggaaaaaaattgagaggattcctatgctcaaaatgcaaaatgtgtcgtttgtcagggaagagtctcactgtgtaccccaggctagccaggcggtcagtacgtaccctaggctggcttcagactttccactgtgtctcattcttgagttctggaattgcatgtaggccttaccactcccggctaaaaattagataattttagcaaaactagcattctctgccactgaattatttgcatatacattttgtctttctttattcaatgttctttttttttgtatttaatctgagtaaaataatttctttatcttttcaatttttctacatttatttatttgtgtgtgtgtgtgtgtgtgtgtgtgtgtgtatgtgtgtgtgtatgtgtgtgtgtgcacatgcaagtggatgcaggcatactgtggaactcatatggaagtcatgggacaacgtgcagaaggcagttcaccgtttaccacttgggttccagaaactgagtttaggtcttcaggtgcggtggaagcattctgacctgacctgctgggccatcctgctgcccatcccttgtcttttcagatataagtagagagacgagattttttttttttctacaacatctccaattcctagcctaatgtctttgaaaaggagcacctttaagatgccttaaggacagaggcaggaggacttctgagttcgaggtcagcctggtctacagagtgagttccaggacagccagggctacacagagaaaccctgtcttgaaaaacaaaacaaaacaaacaaagaaagaaagatgcaatgtggaggggctggggagatggctcagtggttaagagtattggctgttcttccagaagatccaggttcagttctcagtacccacatgtcagttgacaaatatctgcaactccagttccaggggatttgacagcttcacaaggacatacaggcaacagcaccactgcacataaataaattgggactggagggatggctcagccattaagagcactgactgctcttccagaggtcctgagttcaattcccagcaaccacatggtggctcacaaccatctgtaatgagatctgatggcctcttctggtgtgtctgaagacagctacagtgtacttagatataataataaatcttgaaaaaagaaaaagaaaaagtaaataaattgcctggtgtggaagctgacttaggcagagcccggtgagttcaaggccagccttgtctataaagtgagttctaggactgccagggctgttacacagagaaaccctgtctctaaaagatagataatagatcttttttattaaaagatgcaatatggacaaaagacctttcagagcacctgcatatttggggtctataagatgctcccagggaggctggagatagcacctgctgcttttgcagagggcatggattcagttcccagcatccacatggtggctcacaaccatctgtaactccagtccaggggatctggtgcccttgatggcctctgcaggcttctgcacagccatggctcagagacatatgagggcaaaacactcatacagaaaatcaaaatatatattttattttaaaaggccaaaaacatgcttcgacggagtgcagaagtagctccctatatttctctaggtgataggttatctggtgagacaggaccaaggggaccatgaggactgttggatcatggcagtactccatggtgacattatacctttttagtgtgggaggccaggtatcgtggaactcaggaagcagagacaggcagatctctgtgagttcaaggccagcttggtctgcagagtcagttccagaacaaccagggctctatagagataccctatctcaaaaaacagaaacaaacaaacaagtttggggagggaggggtttggggagatggcttcttggtgtagagtgcttgttgctcttgcaggagacctgggtttgatttctagctctcacagttgggcagttcacaacagtctttaactccagttccaagggatcaaataccccattctgacctccagaggcactaggtatgcatgtggtacgcagacataaatgtgggcagaacatttatataagcagataaatctttaaaaatcaaaagaactatatatgtgcatatgtgcacgtatatgagtatctagaagagcgtcaggaatcccctggtgttttgcactgcctggaatggatgctgagaactgaactcaggtcctcctgaattcacccatcctctccatggcaacaacttagcgggagatgtcagacacctgctaacctaatgtgtgaatgaggagaggaagaaaggagaggggactgaagtaagatggacttggatacaaccaagaataacagggaacatccagagtgcagatgccttccctctaggaagaggcattctccagatggggctgtggcgagagagtcttttaactttccttttccctcccctgtcggtccctttgcctccctcgctttcctagcttttctttccatagcatgcacgctctgtggtggacttaagccccaaaccacaaccttgacaaattccaattggatttggtcagcagggccaacaccccctcccagcacaggcgctgggctcaggcccaggactggggtcagtggtggggtgggagtttgcaacccacagaactggtgggtggctacagtttcagcttttactgggctctggtggcagctggagggagggaaaagagcacactctggaggagccctaccttgaccaaatggctaggaagcttagagtggtggggagcagctggttacaggggagtagcacttctatccacccctgcttgtgtcaggccaacctctcctgacccttgtctccccacacaccagagggtgaaggacagaagacctgagggggtctctccagccacacccaccttttccaccataggaagctgtcagtcatttttgtcttcctttcactctgccatacatttgtgggagggctcaaggtcttcatcattaggtttcctctccttgttgaggttccacaaggcatgctgtggaagcactagggagtggggtgagcagtccataggcatacagaggcaagggagtgaggacctaacctggtggagggttatcacaaagttttaggcgagaagtggagacgttaacaatcacactaaaggcatgtcagagcacatgtcagagccgcaggaatgcataatggtcttttttttgtttgtttgttttttgagacagggtttctctgtgtagccctggctgtcctggagctcactttgtagaccaggctgtcctcgaactcagaaatccgcctgcctctgcctcccgagtgctgggattaaaggcgtgcgccaccacgcccggcttataatgttcttaaggtttctattgctgagataaacactgtgaccaaaaacaagctgaggaggaaagggttaacttcacctcacagattctatagtcactgaaggatgtcaggacaggaagtcaggataggaacctggaggctggaactgaagcagaggccatggaggagtgctccccatggctttttttttttttttttttttttttttggataaatggtcttttctgtggaagcctggctactgtcctagaacttgctacgtagaccagcctggcctcaaattcaaagaaatccacctggctctgtctcctgagtgctggaactgacagtgtaccaccgtagctggctcagcttgctttcctgatattttcccctggtattgaacttatttttatttgcatgagtattttgcctgcatgtatgcttgtgtaccacatacatactacacacagtgtccatagaggcctgaatggggcctgggactagagtcacagacagttgcctgccaccatatggatgctgtgaatcaaaccaggtccttgggaaaaagctgcctggccccttagcctctgagtgactagtcagccctcacctgcttcataaaattcaaaggtcgtgccgcccacagtgaccttggcccttccatgccaatcatcaatcgagagaaatgccttgcaggttggctcacaatctggtgaggtcatttcttgattggggcttcctcttcccaaatgattgtaacttctatcaagttgtcatcaactagccagtacagttgacctcttgtcaatatgacacacaaacacatcactattcaactagaccctttcctttctcagttaccctcaacatggcatgttataatgatataaaacattccaatgctgatgtttcccatatttgttacaaattcaaacgtataaagaaacccggtccttttagaaacatctgaagtctctcttttttttttttaagatttatttattgattatatgtaagtacactgtagctgtcttcagatactccagaagagggagtcagatctcattacggatggttgtgagccaccatgtggttgctgggatttgaactctggaccttcggaagagcagtccagtgctcttacccactgagccatctcaccagccctgaagtctcttttaaagttcaatgtttttctaaaacattcaaaatcgctgtaaaattctgaagtttcttaagcgtggagtcctgtgaaataaaaaaaaaaaaaaaaaaaaagctacatacgttattgcttcaaaaaggagaaaccaggacaatcacaaacaaagcaaagcaaaaccagagtccagcccggtaaaaaggccagcgctggggcctcctcatggttctttgggcctcaaagtgctctgtggcctcaactctgccagcttgtctcctgggcccagggcagcgctattccacagtttcttctgtccttggcagttgtcccacggtgctggcatctccaaaaggctgggtctctgctgcagctggattgtgttctcctcctctcccccctcctccccccccccccccccctgaccttgccatgtggtgacagtagaccagactggtttcaaagtcagaggtccacctggctctgcttcccaagtgctgggattaaaggcctgtgccaccaccctggactgctctttccttaatcacagctgattcttcagccccagctgtccagtatcaattaagtaaagtaaaagtttcactttagttgttctttttttgttgttgttgttgtttttttgtttttttattattattggctggggtccctctatatagccctggctggcctggaacttactatgttgatcactctggctgtgaactcacagcaatccatctgcctctaccccccagagtcctgggattaaaggtgtgagccaccacatgtgcactttagcggctcttaattcaaaatatgagacttagactctttaagggactttccaatttctccctgtaacttcccaagtcaggcctctgtcgtctgcactgctcttggcattatcttctaagtccccacagcaacccacggaactctgagcacacaacggctttcccagcccagagttcagatgccaccacaatcctccccaaaacacaaggtcaggtctgtgacagcaacatctcacgcctactgtccaaatgcaacctgaggaagaaagggtttattatagttcatcactgagttggaactcagggtaggaacctggaggcagaaacagaagcagaggccacggaagattgctgcttatacataggcttgctcagcctgatttcttatacaacatacaacccaggggtgacacctcctacagtgagcttggctttctcaaactatcactcaaagaaaatgtcccccaggcctgcttccagcccgagctgatagagcaagacattttcttaattgaggttctctcttcctgcaggactctgtaaccggagtccagctgacataaaactacctagcacagtaactatattttggggagtctcttgcctttaagaacccaggatatgggctagggagatagttcagccattaaaagtactagcaagacaagcttggcccgagcttgttccccagagcctgttgtaataggtggagggcgatcaggctcttactgacctctcttgcctagaggacctggctcccagcaccacgtggaacaactgcttgtaactttgtctccagagaatgttacatttttttctccctgtagtagatatccacacttacaggcacctactcacacacagagacgtatgtgcgtaggtacagttaaaaataaatccatttggctggatgtgtgacaaatacctttaatctaagcactcaggaggcagaggcaggcagatcgtatttgagttcaatgccaacttggtctataaagtgaattccaggccaggtggggctacatagtgagcccctgtctcaaacacaacaataacaaatatatatattttaaagctggatgcctgtggtgtaatgaaagcattcctaaagtaagatgggggatgatgccaggagaatcacacagagctagcctagagtgtgcactgcagcagcagaaaccagagatcctggcccaacgagggaaaaaagtcaagaacagcgactcccaaaaggtgtcctctctaacctccacatcttgctagagcacaagtgcacccgcaatctctcatacaagcacacacacacagagttaataaatggagggaaaaacgagcaaaaaccagagcttaacaaaggctctcaacagcattgagtcctgagtggggacaaatataattctcttcgttataagcaagttccttgctgtccatctcttcgttaaccatctctggctgttctggagcctgctctgtaaatcagactgacctttaactcacagacatccacctgcctctgcaccctagtctccagtgctgggattaaaagcttgtgccaccaccgcccccagccagtcctgtaatttttgaggtaaacaagagaagacaaactggtataaaggtataaaccagagacagatgtgacaagagatagattctgttcccagcctatgttttggagggagagaagagttataacgctgcaccaagctcttatacttgatgcatttaaagaacgcagtgggggctggtgagatggctcagtgggtaagagcacccgtttctggcgaggacccttctagctcagattctaacatagcttgtggctagagtctcaggcagtgtctccatcatgtcaaaagatgagtgtcagggaaggaaggcggggtcctgggtgcgctttcctggggatactaaaatccagactcatctagagagacttcatgagagccgcctctgagtttctgccctctgcctttcagcctcaacctcctagacgaccccatccagatgtttcctctagtatctggaatgcatcgttctttctcctcttcctttatgggaaaggatctcagagaaagcatccttaggaactagggagcagagcggattagcaggtggggtgcgagtgatgcgctgtttatttggaataagactggactagagcaggatacagcaaccgttttcatcctccatgctccacatgggctctgcttaagaaaccccggagactccctggtccgagccctgtggccagcgcagccaggatgtggcaaggtcccggagctcgctctgctcgggagcctcacctcagtgcccacagccccctctacacgccgtgccttccgatcctccagcccccacacaggcccccgcctaggctcagcttcagcaccggctgcttttgctgcagccgctgccatggtgatgggtctcgcgagaactgccgctcgctaccgcgcacttctcgcgcgatcgtggaggtgggaagtagcccgggctgggggtgggtgttcgccgcacagctcctgtcgccgtcgcggcttccggtgctaggtggagggcgggcaggagggagccggggagcgggccagcggaccatcttcaccgcggtcgggtcggcttgcggagcgggaggcagcggccggagagccgggcggaacctgcgggggcggaggcggcggtggcagccgcggcgcagggagcaggaacaggttcggagctggggagggaaggcgggtccgggcagggaagaggctgggtccgggtgggagcccgaggcccccggccgcggtccggctcgcaccgtctgggcgaggtgctggtgtggggggtgatcctcgctgagcttggggaccccagccccactcctgtccccgcagccgaaggacgccgagctggggtgggggcggggggcgcacacggatttgtcctccgcctcccccgagggtgcgacctgggctgcagaggtgagcttgggagggttggggacgagggggaggcaggctgacctgtgggagggggacgcgggggcggtgtggctgtttggctctcttttccttgggtttaaagggctgcgaggaacgctgccttttctctctccctcccccgcccgagctgtgggggaaccaaagaaaagccgtgccgtgccgtggttattctcctccctcacccagcgcgaggcgtggggggccggggcttagtatcagggcctactggtggggctcggctggctgcgcacggtcctcacggaggtggcgctctgctctggggtgttgggaagagggcagcaggtggggagagggtggagaggaggctggagacgggggagggggacctgagctagctcggaggagagaggtggggccttcctcccccaggcggagcgggggcggtgtcaccgaaggagggagcagcttgtcactggccctgagtttgtgtcttccaatccgctttctttctctaggaagtaccaggattcccggaacagaaaatgaagcctttgcttagcatgccagtcctttttgaaggaaggagggggaggtggggaggt

SEQ ID NO: 1199 - DNA, 2217 bp, Mus musculus
ctcgagcagaaccacccgtgagttaggtcgagcagagccaaagcccccggtgcttcgtcgcgggttcgctcgctagctatctggatcactccctcccttttaccctcccttcctcccggcgggcggccgcggcgacgccggggaagcggcagagaggagtggctgggcgctgggagaatgctgctccgccgagggggctgaacccgacagtttccccacggtttaagccccaagagccgggcccgagtgactcaaccgcgagccttgtggatcctgcacctgaaccgctggaggcgctgactgactcgcccaccggagcctccgggcttcgacatgctggaggagccccggtctcggcctccgcccttaggcctcgcgggtctcctgttcttggctttgttcagtcgggctctaagcaatgagattctgggccttaaacttcccggtgagccgccgctgacggccaacaccgtgtgcttgaccctgtccggactgagtaagcgacagctggggctgtgcctgcgcagccccgacgtgacggcgtcggcgctccaggggctgcacatcgccgttcacgagtgtcagcaccagctgcgcgaccagcgctggaactgctcggcactggagggcggcggccggctgccgcaccacagcgccatcctcaagcgcggtttccgtgagagtgctttctccttctccatgctggctgctggggtcatgcatgctgttgccacagcctgcagcctgggcaagctggtgagctgcggctgcggatggaagggtagtggtgagcaagaccggcttagagccaagctgctgcagcttcaggcactgtctcggggcaagactttccccatctcccagcccagccctgttcctggctcagtccccagccccggcccccaggacacgtgggaatggggtggctgtaaccacgacatggacttcggagagaagttctctcgggatttcttggattccagggaggctccccgggacatccaggcgagaatgcggatccacaacaacagggtgggacgccaggtggtaacggaaaacctgaagcggaagtgcaaatgccatggaacgtcaggcagctgccaattcaagacctgttggagggcagcgccagagttccgggccatcggggcagcactgagggagcggctgagcagagccatctttatcgatacccacaaccgcaactctggagcgttccagccccgcctacgtccgcggcgcctctctggagagctggtttactttgagaagtctcctgacttctgcgagcgagaccctactctgggctccccaggcacgagaggccgggcttgcaacaagaccagccgcctcttggatggctgtggcagcctgtgctgtggccgtgggcacaacgtgctccggcagacgcgagtggagcgctgccactgtcgtttccactggtgctgttatgtgctgtgtgatgagtgtaaagtcacagagtgggtcaatgtgtgtaaatgaaggtgagcctcgcctaggcacgacgaggaggagaagcactgtgtgagggctgctctctttcagccctttgctcggatttctgtctagggtttatcgtggctcccggaagctcagagcatctgcctgagaacagctctgggggtgtagggtcaggtgaaatctgtaacgagcagccttttgtgggggaagtggccccacactctgttcttaaacactcgaatagactaagatgaaatgcactgtactgttagcgtcttctctacctacagctccctcgggctcaggttcctacttcctttggatagggagtctatcttttggccactcctcttcctcgaaggataatagcaggcattgtgtggagtcaataagacccgtatatatagcaagagaccacctcttcctatttgtggttctcaaactcctccactacagcccagaacctcctcttatgggacctcgggtgacaataatgagaggttttcggttggaaaaggacagagggcagggaagcctcagacagctgtcttgtcaggctcttgggaggcttctccttccgttcagttgttgaaagggtctctccaaaggaaaggttttagccataactcttggaggcccttttccttcttcagcaggaagggtgggaatggataatttattttactgagatgtgttcttggttcctgtttgaaactaaaataaattaagttactg

SEQ ID NO: 1200 - protein, 400 aa, Mus musculus
LTRPPEPPGFDMLEEPRSRPPPLGLAGLLFLALFSRALSNEILGLKLPGEPPLTANTVCLTLSGLSKRQLGLCLRSPDVTASALQGLHIAVHECQHQLRDQRWNCSALEGGGRLPHHSAILKRGFRESAFSFSMLAAGVMHAVATACSLGKLVSCGCGWKGSGEQDRLRAKLLQLQALSRGKTFPISQPSPVPGSVPSPGPQDTWEWGGCNHDMDFGEKFSRDFLDSREAPRDIQARMRIHNNRVGRQVVTENLKRKCKCHGTSGSCQFKTCWRAAPEFRAIGAALRERLSRAIFIDTHNRNSGAFQPRLRPRRLSGELVYFEKSPDFCERDPTLGSPGTRGRACNKTSRLLDGCGSLCCGRGHNVLRQTRVERCHCRFHWCCYVLCDECKVTEWVNVCK

SEQ ID NO: 1201 - DNA, 26429 bp, Homo sapiens
  misc_feature (1)...(26429): n = A,T,C or G
gaagtgggagagatgggatgcgtatgaaccgcggggagtgtgactggaggtactcgggtgggcgaataaccgggtcttgagtgctagcgagtctgtttgggggagggctcgaggagagcgttcctgggggcgagtccgcgcagcgcctcacagacactcgtgcagtacgcgcgtgtgcgtgcagttgcggcagctgacgtggcagcaccagtggaaggtgcagttgcagcgctcggtgacgcgctgcgtgcgcgtgcggtggcccctgccgcagcagagcagctcgcagccgtccagcgcgggcgacgagctgttacaggcgcgccctgccgtgcctgctgtgcccaggcgtccgctgtacgtgcagaagttgggcgatttctcgaagtagacgaggtcgtggggggagggcggtttgtgggccgggtcttccggctccaggcgcagcagctccgcccgcgaagcgcggttgctgccgcggttgccgtacaggacgcgcgaggcgccgtcgaagcggtcgcgcagcacatcgcccacggcgcgcagcgtgggcagccgcatccagcacgtgcgcaccgtgcatgagccggacatcccgtggcacttgcactcctggcgcatctcggagaatacggtctgcggggataggggaagaaagagtgtcccagggcaccgggccagagtcaccctcccagacactgccctctcccggacgccacgggggccggacctcagcaaaggcccaggcctagctgagcccaggggaagggaggcgcgaaatgttccgctgagatttggaaaccctgcccaaccctgctccgccgcggcgagtcagtctcggcctctcaggcttatttttcgaatctgtacagcgaagagactgtgcttgatttgcaacctcttctacctgtccgcgggccagacatacctttgccctcagccactgtctcctctattctccgtcttcgttccaagcctccggctctcccaggacgccctctcctggtgccccttgccttatctcaccgaccgtcacttccccagcccgaggttggcccctgccgctccgcttagggtgcggagcctctcaaagctcaccgtacggcctgcctcgttgttgtgaaggttcatgaggaagcgcaggtcccgccccttctccccggagtccacgaactcccggccgaagaggcggccgaagtcaatgttgtcgctgcagcccccccagtgccagtcggggcccccggggccgcgccgccggtagtcacacgtgcaggattcgatggaaccttctgagcaggagcgcgccaccgaatgggtgaccccggcggaggtgatagcgaagataaacgccgtttctcgacagcctgtgggagaagggagcggggatcagcgagggggtacgcggggcgcggccagcaccctcatgaagggcttgggaccggaatcccacccccgactccgcactttgagtcctgagagccagggccggcagtgctggaaagctggtctctagggctagtagagaaagcaggtgcgtgggcacgcagccacgtccacgggcgtaatcacaccttactgggagattctagggcgcattttggctcgatagcggaagtggagcagccccagagagacaaaccgaagagaggggagcggaagaaccatacatccccaagacttcttcgcagcccaaaactttcggcccattttggcggtgcaagccttgctgggcgagaggccagacacacgcctgcagagagcagcttcccaggcgcttttgagagaggctgggggaaagcggcggtcagccggcgtccgcgacccgaaactttctttatctggggcagtagctcagaaaagttaagcttcgtttccagggtgcacggctggaaaacgcctggtagaagtctggccccgagctggcgctgggcacgaggcacttggcaaggttgattgtgtgaccctccaggcgcctgggacaccttctctgaactcgcccgcccatgccctgggggtgaccccgcgtttcccctgctcccggaagcgtcgccttcctgggcacccacctcggttgacgatcttgccgaagaggtggggccctggagcagtgggacagttccagcggcgattccggaactgccacttgcactcgcgcacggcactctgcagccccccactcacgctgtgcaggatccccggattttggcgtatcagacgccgctgtttgcggctcaacagctgcagactgggctcgagtaccagttgcagactcttggagtctgtaagcaggttcgtggaggaggctacgttcacaatacccctggtgggacgtatgatagctcaggctcaggaaggggatccgcaccctaaccataaaaactgtgccacccggtcctcttcctgggggtatgtggctggagagaatggcgggagattaataatacccgctctcccaggctcactaatttgaaagaactgggcgtccagacttgtgtgtgcccagtagtcccagggctgctcgcctgagccctaggtccggagactggacagaggaggtacccggagaccgagtgtctaccttggatctccgagcctcttccggtcagcctgagcgagataatcatggcctgcagttcttgcccacccaaggcgtgaaatgcttaggagtcccaccctcttctcccctcctttctaggcgaactcctggcccttcacttcccgaggtggggaaacctgtggtgagccaccgccgtgaggctggagttggcgctcaaaggggaagggcggtgctagatgagagtgggctccctgcctggggtatcttaggcctccgcgggcggatcattcgccccacttgtacagagctggagtctggggcagtttcatgccagatcgcccttcggtgtcgcggagggaagtcagagcggggagggagcctgtcggcagacggatcccagagcgtgggagctgggtagggttggcccctggctctgtgccgcgggacaagtggcgaccccgcaccagctcacttaccaccatcggccactgctgttggcagccagggctgcgggcagagcggccagcgccagcagcagcgtagcagaaacccagccaggcaacagcgcccagagccccatggcctgcctggctttgcccgctctgtgctgcagttgcggcgactttggttgttgcccgcgacggtgggacgggacgcggcggtggcggcagtggcgagagttcgcagtctggctttaacaaccctgggggcgggcggcggacagcatggctcgcggtcccggctggtgggctgaggcggccacggcgggcggcaccgcctcttatagttgcggcgctggctgaagtgacgggaggaggctgcccctccgggccgcactgtggcaccagggcgcaccggttaggggcgcagacaatgggcagcgagcggggctgtggttcccgcccgtctgagccgagagctgacgggttggccgtcggggctcacccccgccccctgcccggtggcccccgcctccgggcctgcactggccgcggacccctccccttgggacaccctcccacgcgcgcccgcctcactcagctgagcgtccggagcccgtcgaggactagcatccgccagggggcgcggcgagagtgtgctgcggggagagcccgccaggggcccagcccgcctcgccgcccgcggtggggttgtcccctcgacgtcaccccgggcccctccgacgtcccctctctcccccatcctgagtgtcggaaggaaagctgtggttctgggcagcgactccggggagatgcttaaccgcccaggaacccccgatggctggacagagaaggaaaaaggggagacgggggcgtgagtgcggctgtggtcagggaaatcccggggatgagttgtgggggtgagctaaccaaaaggagcctagcggtggagagaaacctaaagcaacaggcagtttgctcatgtgcgccagaagaagcgcacaagtggctgtgtgtgtgtgtgtgtgtgtgaagtggaacaacgtgaatatgggtgggagtgagaatgtgctgtgttctgagggtgcatcctccctgtgtgttggtacgtgccagaaactccttgttctgacgaaggatgttaggaaactttccaaagaattttggaatttagctcaagtcagaaaaggtcatggagtcaccttgtcacagtcaccgcctggggcagtgtgtcaggaaggaggtggcaactgtcgacaggagactcagaagcatgattgagggatgcagagtgtctggactgtgtgtggagtgggtggatgagcatgtgcatgggaagattaaatatgtgtgtatgcgtcattctgttgccctttgtacctcgtggcatcctatggcgtgtcacactgtggtatgtgtcaaccagtgcatgtcattgggggagagagccgagcctacaaccaagatggtattgaggtgaacccagcctggagtggctaagtctctgaggcctaggctcagaaaggatgggaaatggtgcggatgtccactgtatgtatggtgatggagaggactgggaagacaagggttgctggctacattgaacctagatgaggaaacttgtgcctccatgtgtttgcttctctttggatgtttctgccaagtttctgtctttccctaaagctctagttcccaccacactgggatacccagagtgcctgtgaccatctcatccattgtacacttttctcttctctcccagggactcctactcagcttcaaggccatttaggcctcctattgaagaagtgacaggctgggcgcggtggctcatgcctataatccccgcactttgggaggccgaggcaggtggatcatgaggtcaggagatcgagaccatcctggccaacatagtggaatcccatctctaataaaaatacaaaaattagctgagtgtggtggcgcacacctgtagtcccagctactcaggaggctgaggcaggagaatggcttgaacccgggaggtggagattgcagtgagccgagatcacgccattgcactccagtctgggctacagagcaagacttcatctgaaaaaaaaaaaaaaagtggctgcttttccctatatggggaatagggggcactgccagcctggttatcatgccccaccaccacacacatggcccctggaaggagggaagatctcttctctctccccattttgcagaattaaaaatagatcaggcacttgtccaaggtccacgtctaataaatgaatcaatggtagagccagattaaaacccagaccaatttgactcaaagcccatgctctttcgaccttaccagctgcttgccagtgtgcagcaattacaggctgggaacccttctcaaaattgatgggtaaaaataattttttgggcctttctgcctcccttttgagttctagctctcatttttttcatctcccttgtcttttaggatgccttctgactgagaaatttccccaggcctgaacctaaagtctcaagtcccagaaatgactaggattcccttctaaggcagggaaatcactctaaggaataaatgccaggtaagtttcattaatattcccgggcacttgtgttttaaatgagatgcatattaacccaaatgaagcctgatggaagttattttagaaagaaatgtccttctttcccttttttcttcccttttgcccagcctagtatatctggcccttccaaggatccaccccagagggaaaaggtgtagtggtccagcaccctccgtagatccaaaagccagtagtccctgcagagagcacccagcatagatagctcaagtaaatggacaatgtatcacggggagcctgtcctttatcccttatgagtttcttcccactggggcctgggtcacatcttttggcctggtggattgatacaacaccgtgagggtgggaggctggctggaaaatatggaagccctgtctttgacgactgttgtcaagcagaggtgggaagagaggaaaggagccactgtgctttgttccaacattccacacaccaggagtagggggcaagagggtaaggcccctagatctgggtcacactgtttatgacctggctgacatttctttttcaaaatatgaaatgcttcacaaatttgcatgtcatccttgtgcaggggccatgctaatctctatatcattccaattttagtatatgtgctgccaaaacaagcacccaactttctatttagatcaaataatcatgatatcaactgtcccctctttctttcctgcatcatccacttatctctctcctggaacatacacataagcatgcagacatgctgcaatagtacccatctgaaaaacccaaaaacttcattagaccccacattactgcccaagattgctccatttcagtgctccattttactgcaaaaatcaaaagggttgatttaattactagagccaatttctttctttctttctttctttttttttttttttgagacggagttttgctcttgttgtgcagactggagtgcagtggtatgatctcggctcactgtaacctccaccttccggtttcaagcgattctcctgcctcagcgtaccgagtagctgggattacaggcgcccaccaacactcccacctaatttttgtatttttagtagaggtggggtttcaccatgttggccaggctggtctcgaactcctgacctcgtgatctgcccacgtcggcctcccaaagtactgggattacaggcatgagccactgcgcccagcccagagccatctttcctaaaacagaagtctgattagttcatttctctgctcaaaattttccagcgagaccccatgtcactcaaagtaaaggggcctccttcctagccctccagcttcattgcctaccactctcttccttgcgaatttctccccactagcctcactggcctcttttctaatcctttgaaccaagcatgctcctttctaagggtctgtgcacctgcttttctgtcttctaaaatgctcttcctcagatctctccatgtatttgttccttcagtttgttttccctccccctttataaaatagaatcccactactaatctcctttaccctgcttcatttttctctgtatcagttttgaccgtggatgactttaaaggcttgaagttgaaaatcagtagcaaaccacccccctggaatagggttagaggtgagatgttagaggggagaggggctttgccttgactttgggatctggggaggaagcagggctccagggtttagagtttgtgggcagaggagcctaccctcctttgaagcacccgcaggcagcactgcccccttgggctgggaaggcacagcccatccattaggcctgagtacagaagggggcaaaattctgtctaaggtaatcccatggatttgttggagtggactgctgaaagtggggccttcctgagagtccagtatgcagtcggcccgcagaccctttggtgcctccaggtggtggcctacggtgctgcagcagaaggcgcattaagcggagggtgggcagcgcagctgagctcaccgccacgggcgcatccatccctcctgggcctataatttgggttccccgggtctggcctcccctatcagcggctcagcaacagatgagtcacccgggaccccgggccaaggcaaacatggggggaggaggaggaggaggcttctgaggctttagccaccgcctcagttgctcgacatcccccaatctccaggggcccccactcttttctttgacccccgccctccagggccccagtgttcttcccacattgctctcgttacaccctccatccctaggatgggaagggcagccctccactcttctcattgaggggaaggggaaccagcttgctcctagtccctccctgcagtgatgaaagccccccactttccccctcctgtcattggccctgacccacgtcaaggtctctctggttcccgtccctcccctttcttggagctggccgcgtgcttggggtattaggcaatgggtgtgcacccacagccctctccaggccccgcctgtcccaccgccctctagccgcctgcgggtcagtgctcaggccagccggtcgggctgagggcactgcgggccagctcaggccacccagtctgccggcctgtggcctcttgtcccagagttgggcttcagtagagagaaggagcaggactctgggtccttggatttggaacagtcctgcttggggagacctagggtcaccaggaagttgaaacctattgtagtagttctgcccctcgccccttcttggcacctggctgtatgctggagcctgacaagggtagaatcagaaggcaaaaaataatcccaaacctaagggggacccagagacacatggagaaatacaaatgtccatgaggtccccatggagaagagaggcttaggcaacctcattcccctcttccaaggacctggcaggaatcccagggtgactgcaagaaaaaggataaggacactggtggggatcatgaatccaggtgtaaggatgaaaactatgagatggggcttgcagattctggtgacctccaaaaccacacatggtttggctcttgtcctctaaatgggaaggagggtcaggaactctagtgctcccacttccccatcccagaggtagggaatcagagaaaagcagtctggtccaggctgtccagtgtcagggaccatggcactttcacctccccagactgctcacagcctggcacgtaaaggtgatctgtaaatatcccaacagatgtaagtttgctcgatctcctgtctcagactgctgtgcccgctatccaacagtgacccctgcagcacgggcaggacctccagcagcacagactggaggctggctgcccagcagagctgcaacgccaccaccaaggaagaggtgactgtggttgtgggtatcatccctgttcctctgcttgcttgggggcagtctgagtcaatgtgcctggggcgcgtggggccagccgtgccttgggctgcggtctggcaggggcggggggcggctggaaagcctggggcccctctctggcaaaaatagcccacagtggttagagcttcgagggtgagtcaggcgggagcacggtggcgcctaacccgttcgctgccactgggtctccctaaggcggtttgcctttgcctgtgcaccccaagaccaggctctttcccggctgcccttgggcttggctcaattttggatcccaaggccctcctcatcccataagaagcaagtctacagcttggagcaggaatccaggccacccaaagtgcagaccgggggaatcccgagaagggtaggatacctctgttggcaagcatccctgccaggcaaggaagcatcggggcaggctgacaatctttggtgctacttgaacctctgctagggccaaactctgaggccaaagctgtcccctccaaaggggcaggcgcagggcttggaggagggtgggaaccaagctgcccagacgtgtgcttctcctgcccgctctgagtaccccgggtgcgctcaggctgtgggtgccacatgtgactgtcccacaccgagaagcccaaagactgtctggctccatcctcatcttgtcaaaggcaccttccagccaccctgatcttggtggagaaactgacgcaaagaggagtgatgaaagatgtggccatctgggccccattctggctccctaggaaggttactacaccctccctgcagccttggcgaccccagatcaggtgagaggaactctggccacctccttcttcagtggggccaagcctgaacccaggcgtcgggggagagggtgtgtgagagagagagagtgtgtgtgtgtgtgtgtgtgtgtgtgtgtgtgcgcgcgcgcgcgcgcgcgctgggaggagggggaggctgcattcgcctggtcaaggctgggagtggagggtagggtggggaagccccaggctcggggaggggctgcagctccgtcagcccggcagagccaccctgagctcggtgagagcaaagccagagcccccagtcctttgctcgccggcttgctagctctctcgatcactccctcccttcctcccgcccttcctcccggcggccgcggcggcgctggggaagcggtgaagaggagtggcccggccctggaagaatgcggctctgacaaggggacagaacccagcgcagtctccccacggtttaagcagcactagtgaagcccaggcaacccaaccgtgcctgtctcggaccccgcacccaaaccactggaggtaattagacctgggaaagcagggagggcagggacgtgcacacgaggaagagacaggcacgtgtgtagtcagacagacagacagacacgcatccacccacagaagcacagagacgcatagagagccagagatattgctagagataaagacacagagaataaaggagtgcccccagatttagaatgcaatgaatgtgagagccaaggggtgaggaccagacgggcgactatggaggaggggagcttgtagttaggcaaggtgggggatagggaagaggactcagtctgtgccacggtcccttttaggagggagccaggctctcctccccatctttcctgcacctggagcctctcctctttccttgctgctcagggagggggcagtgtgagtggggaactcattcttagacctttctcatggagcctacttgcccttgatgacacctggaggtgacacccccttaggtggtggggaacctcctccctatccctctccctagccctgtgagggcggggaagctagtcgtggggccctggaaaagggagcagtaggcgaggttgtggagcaagtgtttgtgagtctgtgtgtctgagtttgcaagtgagtgtgtgtctgtgtgccgggcgttgtgtctgattgggcaaggttccaggggtgctcgcttgagtcctgagctgggacaacgccttgactcttcttctttaagacctccaagcctcagggactctgggaatcaaggggtgtttcttcttgttttgtttgaggaggaatgagaagggtcagtagggtggcaccggtgggttaggagcccgaagaagggcgtcacttggttccccaagcgagccgccctattcctgaacccgcatcaagtctcccgtcccgcaggtcctgatcgatctgcccaccggagcctccgggcttcgacatgctggaggagccccggccgcggcctccgccctcgggcctcgcgggtctcctgttcctggcgttgtgcagtcggtgagcagttccccttgtctcccaggccatagaaacaccgacccggggtggggagagttggaggggtctggaccgcagaccccagacgccttcttggttcccagggctctaagcaatgagattctgggcctgaagttgcctggcgagccgccgctgacggccaacaccgtgtgcttgacgctgtccggcctgagcaagcggcagctaggcctgtgcctgcgcaaccccgacgtgacggcgtccgcgcttcagggtctgcacatcgcggtccacgagtgtcagcaccagctgcgcgaccagcgctggaactgctccgcgcttgagggcggcggccgcctgccgcaccacagcgccatcctcaagcgcggtgagcctggctgggcgggtcggcgctgccgcggaggctagggggtgggcggcagggcgaggcgcgcggaggcgggaagggatggtttcgcggctccgggaggggcctctcctggaattccccgccccccccggagccgctctgagccaggtctggccactcgtctgggcccctgcgcgcctaacttccacctgcgtgctgccagcgaggcagctgggtccctgctctcctaccctagggcccccctttcctgcctccgctcagcttaatctgggttgcacctgtgaacaagagatgcccccagtcctggaagcttcaaacgcccccctattccctccaccattttctctccccccatcttggctggacaagcccaggctggtgtccccagtgtctcagcgggggtggggtgacgcccccaaccgtttaagggttaaatctgctcccctaattgctggggttcccaggagccaaagctgggaacaaagaccctgatgactttgaagctggggagccagtcccctcctctgtgctgtgggggctccaggtgttgctcacctgagcaggtgaagaacggctggagaggcagagaacaggtcactgctggcctggtctgggaggcatggctgcctctcctggtttcccactggagttcactccctgaggtgtaaagacccatgggggctcagcccagagatgggggcagtgctctggggactatggggttaataggcagctgccatctgcaggggaattcccaagacttgtgcaaacagcttcacccctggagggttggagttagggggatcagaaggctggcccaggagccctagatcctggggtagcagaggcctggtctctaagcgggtgctgtctctcgtcttctcagggctccggagagcccctgcctaaaatgaagtgagggtccccctccttccccacagggcctggtgtaggggaaggcttggacacccaaatggtgagcatgtttatttaagtctgggaaaggcttggcagcctgagcttctgtgacccccaaaacataacaaagaagccaaccttttaagagggccttagggaaaatcactccccaacctctctcctcctctcagtgttttatagggtaatagcaggttaggataaacataaaaagggcagtcttgaagggcaaatataaaactacatcttgggaagcggaagggcagctccatagctccagtgctttgggggtgctaggatggtggtaggtaggttggttaaaagactgattaaccctgaagtgaatttaaaaaaaaaaaaacaaaaaaacagaaccacaaaggctctgctcccacctcacccacccaagctccctgcagggttgggggaatttctaaggctttcagatgtagaactcggttgtacacatcttcaaagacctcagggactccctcttagtcatctcccgactccaggggtctctccctgtgggctagctctttcatctacacctgaaaatcacagacttacagaatgagaatgggcctcagagatcatcttgacccatcgtctcctgcctccctttagaaatgaagaatctgaggctctgtgctttttgtacccttccttgtcccatgactttcctccaaatcactcagctggtgaatggcagggtcaggattcagttaggaatttctggagttggaggggggctgtttatttctttctgcctccacactctcagctgcctgtcaaccttacctccaccatcacacccttctcatccccaggtttccgagaaagtgctttttccttctccatgctggctgctggggtcatgcacgcagtagccacggcctgcagcctgggcaagctggtgagctgtggctgtggctggaagggcagtggtgagcaggatcggctgagggccaaactgctgcagctgcaggcactgtcccgaggcaagagtttcccccactctctgcccagccctggccctggctcaagccccagccctggcccccaggacacatgggaatggggtggctgtaaccatgacatggactttggagagaagttctctcgggatttcttggattccagggaagctccccgggacatccaggcacgaatgcgaatccacaacaacagggtggggcgccaggtatgtgtgtacatcttgtcctgggtctccccagcttttgaggcctggttagagtttgagaggcatagggaaatgataggataaagtgtgatgagtgactgacactcaccatcagcaagtcacccagcctcagttttgtatctgtaaagaacctaatgatacttatcttacaatgttattaagactgagctagcaggccagtgtggtggctcacgcctataatttcagcacttttggaggctgaggggggaggattgcttgaggccaggagttcaagaacagcctgagcaacgttgtgagaccccatctctatatttaaaaaaattatacatataaaaacagactgggccgggcgcggtggctcatgtctgtaatcccagcactttgggaggctgaggcaggcagatcacctgaggtcaagagttccagaccaccctggccaaggtggagaaaccccatctctattaaaagtacaaaaattaggccgggtgcagtggctcacacctgtaatcccagcactttgggaggccgaggcgggtggatcaagaggtgaggagatcgagaccatcctggctaacatgggaaaccctgtctctattaaaaacacaaaaaattacccgggcatggtggcatgtccctgtagtcccagctactggggagactgaggcaggagaatcgcttgaacctgggaggcagaggttgcagtgagcctagatcgtgccactgcactccagcctgggcgacagagcaagactccctctcaaaaaaaaaaaaaaaaagacaaaaattagccaggcgtggtggcctgcgcctgtaatcccagctactcagtaggctgaggcaggagaatcgcttgaacctgggaggcggaggttgcagtgagccgagatggcaccactgcactccagcctgggcgacaagagcaaggctccgtctcaaaaaacaaaaacaaacaaaaaaacagactgagctagcaaatagtatacccagcatagtgcctcatcgttggctgactgcatagtagctcttattacagctaccttccctacagaatttaggcatgctgtgggccagactcccaattttataagtgcttacaatggaaagagcactggattgggagtcaggacaacttgagttgagtcttggctctattactagctgttgatggaagatggacaaatcacactgctctgtcttcaattctgccatcataaaatgaggaagttggctattagctaactgcaatgtcctttctgttctgatataccatgttattcttgcctccatttgtccctccctgtgttctctgttcccttccctctcctgtgcctctgtgttctgtccatttgctgccctctgcttcacctcttttccccctgatgctctaggtggtaactgaaaacctgaagcggaaatgcaagtgtcatggcacatcaggcagctgccagttcaagacatgctggagggcggccccagagttccgggcagtgggggcggcgttgagggagcggctgggccgggccatcttcattgatacccacaaccgcaattctggagccttccagccccgtctgcgtccccgtcgcctctcaggagagctggtctactttgagaagtctcctgacttctgtgagcgagaccccactatgggctccccagggacaaggggccgggcctgcaacaagaccagccgcctgttggatggctgtggcagcctgtgctgtggccgtgggcacaacgtgctccggcagacacgagttgagcgctgccattgccgcttccactggtgctgctatgtgctgtgtgatgagtgcaaggttacagagtgggtgaatgtgtgtaagtgagggtcagccttaccttggggctggggaagaggactgtgtgagaggggcgccttttcagccctttgctctgatttccttccaaggtcactcttggtccctggaagcttaaagtatctacctggaaacagctttaggggtggtgggggtcaggtggactctgggatgtgtagccttctccccaacaattggagggtcttgaggggaagctgccacccctcttctgctccttagacacctgaatggactaagatgaaatgcactgtattgctcctcccacttctcaactccagagcccctttaaccctgattcatactccttttggctggggagtccctatagtttcaccactcctctcccttgagggataaccccaggcactgtttggagccataagatctgtatctagaaagagatcacccactcctatgtactatccccaaactcctttactgcagcctgggctccctcttgtgggataatgggagacagtggtagagaggtttttcttgggaaagagacagagtgctgaggggcactctcccctgaatcctcagagagttgtctgtccaggcccttagggaagttgtctccttccattcagatgttaatggggaccctccaaaggaaggggttttcccatgactcttggagcctctttttccttcttcagcaggaagggtgggaagggataatttatcatactgagacttgttcttggttcctgtttgaaactaaaataaattaagttactggactggtggatgcagatggtgatgtatgtacccacacttgggatcccagtccatagcttcttttctaggtgaattctcctaccttcctacactcagtgactttatgtatatcctgctgagttccgcaaaggatttgaaatgaatctcagtgactttgttggcaacttttcctttgtaaaaccaggaaggactcctaggtgggaagggctagagttccagatgtaggccctattgactctctatgcgcctcaactccagatttcaccttgatcactgccttagaacaagggctggcaatttttttgttttttttcggtaaagggctggatagtaaatacattacacttgtggtctttgtcccaactattcaactctgccacaactactcaactctgctgttatagatcaacagcagccatagaccacacataaacgaatgagcgtggccgtgtccagtaaaacttcattcacagaaatgggctgcaagaccaaatttggtcccctagctgcagtgtgttgaccctcattctagaccacgaggttgcctttgttctggagtttttcagtcctaaatgtatctcaacactgaatttggacccaaaagaacaggtacttttttctctggttccaaaggagtgaacttgggatatagatgcaagactgatgggaaacgtataaaagagattcatatgcttgaaatgggagtttttccctctggaaactagcaaaaccagcatgttctctcatggaattatttgcatgttttttgtccttatttatttgattgagacagggtctcactttgtcacccaggctggagtacaatggtgagatcttggctcattgcaacctcctcctcctgggttcaaaccatccttgtgccttagtctcccgagtagctgggattacaggtatgcattaccatatctggctaagttttgtatttttagtagagatgggttttcgccatgttggttggccaggctggtctcgaactccttgcctcaagtgatccacacgccttggtctcccaaagtgctgggattacaggcgtgagccactgtgcctggcttatttattattattattttttgagacaggatctcgctctgttgccttggctggagtgcagtgacatgatcttggctcactgcaaactccacttcttgggctcaagtctgggtccaagagtagctgggactacagacacatgccaccacacctggctaatttttgtgtgtgtgtgtatttttttgtagagatagggtttcaccatgttgcccaggctggtctagaactcctgaccttaagcgatatgcctgtctaagcctcccatgaccttcctcatttagagctcttttgtatgtcatcttagtaaaataattcctttatcttttaagagataacatcaactcaacagaacaggatttatttttatttatttatttttgagatggagtttcactcttgttgcccaggctggagtgcaatggcgtgatcttggctcactgcaacctccacctctctgattcaagcgattgtcctgcctcagcctcccaagtagctgggactacaggtgcgtgccaccacgcctggctaatttttgtatttttagtagagatggggtttcaccannnnnnnnnnnnnnnnnnnnnnnnnnnnnnnnnnnnnnnnnnnnnnnnnnnnnnnnnnnnnnnnnnnnnnnnnnnnnnnnnnnnnnnnnnnnnnnnnnnnnnnnnnnnnnnnnnnnnnnnnnnnnnnnnnnnnnnnnnnnnnnnnnnnnnnnnnnnnnnnnnnnnnnnnnnnnnnnnnnnnnnnnnnnnnnnnnnnnnnnnnnnnnnnnnnnnnnnnnnnnnnnnnnnnnnnnnnnnnnnnnnnnnnnnnnnnnnnnnnnnnnnnnnnnnnnnnnnnnnnnnnnnnnnnnnnnnnnnnnnnnnnnnnnnntgagactcccgttctcaataaatacatacatacatacatacgtaaactgttttcttcctttcttcctttctttttctttctttatttcctttctttctttctctttctttctttcttcctttcctttccttcttctttcttttctttcttttttttttttttttcatacaatgtcttgctctgtcttccaggctgagtgcaatggctcaatcttggctcaatgcaacttctgcctcccaggttcaagcgattctcctgcctcagcctcccaagtagctgggattacaggtgctggccaccacacccagctaatttttgtattttttatagagatagggtttcgccatgttggccaggctggtcttgaactcctgacctcaggtaatccatccgccttggcctcccaaagtgctgggattacaggcatcagccaccaagcctggcctaagctgttatctttctaagattcaatgcagacaaggaatatgcatcacacatttagaacttcacaaatgactgcacacttatgcagctgccagatgctgactctaacagattatttctttggccagagaatgtagaaatagttctctccacttctctagacaatagacacttctgctaccctcaaaatcagatgaaatgagagtagtaccaaggtagtgaggacattttgaggagtattaggttagggcagtacttttttttgttttttgagacagggtcttagggtttctgtcacccaggctggagtgcagtagcgtgatctcggcttactgcaacctccacctcctgggctcaaccgatcgtcctgcctcaacctcttgagtagctgggaatacaggtgtgcaccaccaggcccggataatttttgtatttttagtagagatggggtttcgctatgtcgtccaggctggtcttgaactcctggactcaagctatctgccctcctctgcctcctaaagtgctacggttacaggcatgagccactgtgcctggccataggacagttttgtttgtttgttttttgtcttatttttaagagacagagtcttgctatgctgcccaggctggtctcaagctcttggacccaagcaattctcttgccttggtctcccaaagtattgggattacaggtgtgagccactgtgttcagccagtactttttttttttttttttaatttagagtcagtgtcttgctctgtcactcaggctggagtgcagtggcaagatcactgcagccctgaactccttgactcaagtgaacttccagccccagcctctcagagtgttgggatttacaggtttgagtcaccacactgggctctagggcagaactttgtggccaaattttatgtcctggatttccacttgagcattgagaattctgggtttggaaatttgatggagacaggagaaatcccatccttacttcaggcacttactgaacctagtgtatgtggaaggaagaggggatgcacttagaatgggcataggatataagagaataatgataaagaatatttataatcagaacttctcacactcaggacgaggaaggagaatctctaacagagtcacagcatgattatttcagctttttcctgtttccttcctctgtactttgggtccctctttcctttctagcgttccctcttccttcatcagacacactgtgtggcaaacttaagccccaaaccacaaccttgacaaattccaaatggattttgtcagcaaggccaacacaccccttcgccactccctatccctgctcctagcacatgcactggggtcagcgacagggttggagtatgcaacccacagagctggtggctacaatttcagcttttactaggctccaatggcagccagagggagggagaaaggctgatgaactgtaagacgggcctcttgtccctcttcagctccagatgagttctactcctgctggcctttaccaagtggctgggaagttagggaggggcagtggccagctaattgccagctgggcagcactcctcctatctctgctcctgtttgctccatgggcagcgcactctgatgctgcaacagacgttttcttcttcagactccagacaggtgaaggacagaagcgctgggagattctctagtcccattaatcagtcctgactgacataccatggtacctgctgcttactacattagactgtcaccatttccatctttctattgcactggggataaaaccttgagaagatctgaagcactgggcaggaatatcaacaggttccacctccttgtctgagttccacaggcatgtgcacgtggtaagggcactagggaggttttataaatcatagttttggtggacagcatggtgggataacctggtggagtgttactagaaatttctagagaaataaatgaaagagtaatcacatggaaatatcaaaaaacccactctaggagtaataatactggaggaagatccttttgtagttcataagcataatgactgggtgcttacacacatgtgagatgtgccaccctcaaaccttgttacattggcacactatccatttgacatgaacaacaacaacaaaatactggaggtgtcttttgtccttaaaaacacagagctgggctaggcacggtggctcatgcctgtaatcccaacactttgggacgcctagatgggaggactgcttgagctcaagagtttggcctgggcaacatggcaaaaccctgtctctacaaatagcataaaaattagctgggtgactgggcatggtggctcacgcctgtaatcccagcactttgggaggctgaggcaggtggatcacctgaggtcaggagttcaagaccagcctgaccaacacagtgaaaccctgtctctactaaaaatataaaaattagccgggcgtggtggcacatgcctataatcccagctacttgggaggctaagacaggagagtcacccgaacacaggaggcagaggttgcagtgagcggagattgtgccattgcactccagcctgggcaacaagagcgaaactgtctcaaaaaaaaaaaaaaaaattagccaggcatggtggcgtgcacctgtagtcccagctacttgggaggctgaggtggtaaggatcacttgagcccaggaggttgaggctgcagtgagccgattgcgccactacacgtcgtactcagcaacacagcaagacccagtttctttttttttctttcttctttttttttttttgagacggagttttgctttatcgccccggcttgaattcaattgcccgatttcgggttcattgttggttcaaattccgggtttaaggcattttccttgattaaccttagggattatttgggcttttaggcccttgcaccaaggcttgctaaattttttgaatttttgttagagacgggtttccccgtgttagccaggatgttctcgatctcttgacctcgtgattcgtgatccgcttgcttgggctcccccaaagtgctaggattacaggcttgagccaccgctcccggccaagatccagtttcaaaaacagaaaaaaaaaaaaaagcaagaaacaaacaaacaaaaccaccaacaaaaacacacccgacagaactacccagcacagtggcacatgtctataatcccagctactcatgaggctgagacaggaggacacaagaacccaggaattcaagactgaagtgtgctatgatcgctcctgtgaatannnnnnnnnnnnnnnnnnnnnnnnnnnnnnnnnnnnnnnnnnnnnnnnnnnnnnnnnnnnnnnnnnnnnnnnnnnnnnnnnnnnnnnnnnnnnnnnnnnnnnnnnnnnnnnnnnnnnnnnnnnnnnnnnnnnnnnnnnnnnnnnnnnnnnnnnnnnnnnnnnnnnnnnnnnnnnnnnnnnnnnnnnnnnnnnnnnnnnnnnnnnnnnnnnnnnnnnnnnnnnnnnnnnnnnnnnnnnnnnnnnnnnnnnnnnnnnnnnnnnnnnnnnnnnnnnnnnnnnnnnnnnnnnnnnnnnnnnnnnnnnnnnnnnnnnnnnnnnnnnnnnnnnnnnnnnnnnnnnnnnnnnnnnnnnnnnnnnnnnnnnnnnnnnnnnnnnnnnnnnnnnnnnnnnnnnnnnnnnnnnnnnnnnnncttagggaagagccatgtgttcattcccttatactgctgtaaatgaggagagagggcacttagagaaccttctattggccgggcacggtggctcacgcctgtaatcccagctactcaggaggctgaggcaggagaatcgcttgaacccgggaggcagaggttgcagtgagccaagatggtgccattgcactccagcctgggcgacagagtgagactcttgtctcaaaaaaaaaaaaaaaaaaaaaggaaccttctgttcttagcattactagtgcccttctatcacagctatttttgtttcaaggcagttctgcatgtctagaccaggtgcaaaacggagtgtgagggaagtaggagtgggtaggaagcaagaaatatgggtgcaaagtccttcacctttccttgggatactaaaatccctactcatctaggcacacttcctcaaaccacacttctgaatattaggtttccactctccgtctttcaagttccaacttaactggctcagagtccagctgttttcctttagcctcttaagttcatcactctccttcctcttccttatgggaaaggatctcttgattcagaccccacagtaatctagtctcaggaatagtgagcaacaacaatggtgcggtgagggctttcaggggatggcagctagcccagattaagaaataaagatgaagtctggctgggtaaggcatgccacagcaacgactgttcacccatatcccgatgctggctttgcccaaggagcccctgggcccctcagcccagcccgtctcctacgcagccaacttgccgcctcagtccttaaattccaggcacaaccctggagcttgggattgtcacctcagtcctcactgtctcatccccattcacggctcccgcctccgccgcccacagcccccacacctgcccccgccctgactccagctccagcgcccggctgccggtgctgcagccgctgccatggtgatgggtctcgcgagaactgccgctagctaccgcgcagctctcgcgcgatcggggaggtgggaagtatcccgggctgggggtgggggtacgccgcacagctccagtcgccgtcgcggcttccggtgctaggtggagggaaggaaggagggagccggggagtgggccagggcagcagccgggctgaagtcggcttggggagccagagggagcggagcggaacctgcggggcagaggcggcggccgcagcggcgcagctgatagcaggaacaggtgagaggctgggaagggaaggcgggtcccggtagagaagaggctcggtcagggtgagggctgaggagatagagcgcctcccgggccccgcccggcactgcttggcgtggggcggtgggattcttcccacccgagagctcagagagggtgcgtcgggccagcttcacgcctgcccccgcatttgaaggacgcagagctggggtgggggtggggggcgcacacggatttgtcctccgcctcgctcaagggggcgacctgggctgcagttaggttgtcgcctgcaggaggtgtgctgttgagggagaggaaaaccgtccgaggagaggtgatgagggggcggtgatggctgtttgtatcttttctgttaaagggctagggaatgctgctttcttctactccctctccctcccccaccttagcaataggagacgggagagaagccttgctgtggttacaccccctcccccatcatagggcaggggtgcgtaggggggttgggggttagccaacagggcaggctgctggggcaccacatgggcgctattgtggtagaggttgcgctttcgagtctagggaaccgcaggttgggaagagggcagcaagtggggagagggtggagaggaggcaggagaaggaggagggggatctgatcttcctgggaggagagaggtggggccttcctccccaggcggagcgggggcggtctcacaggaggagggagcatcttgtcactggccctcagtttgtgtcttccaatccgctttctttctttaggaagtaccaggattcccggaacagaaaatggagccattgcttacgcgaatcgtttgagggaaggggcgggagttggggaggtggagttccctgttaaaacgggccacttgattagcaaagtggtagctgttattttgggggaattcccgtcttgattgcattaaggcgggtctccatctttccaggccaggaggaatgtggtggtggaggtggaggattgtggtatgtggtcaggagtgagaagaaatagtaaggccgtcccggtgagggagaaatgtaacctaaaacctgtctctgctgttgttggattgggtcacccctggtctatggcatgaaagttttattgggaggagatctgctgcaagagtctgattgcttgggtcagtgcaacaggacagaatctagtcgctgcatacctccttccctgtcctcaatcaggtaggtagtaacagtctttgctgccattttgtcttgggcttgttgttggggtaggtgtttccacttgccgtgacttgggacatgggacagtgttatgggacagtggattatcatagcccattggacttgagtttgaaaaacatgtctgtaaaagttcattctaagaaagaaactaatccattaaggttcagcttttcaccgaatgaatgattgaccttggattcagccaggaaaggctcccatgtatcacatattcacatgcgtcctgtttcccagcatagaattattaccttgcatagttagaatttttatagttgtctatcttgcttttccaaagagactagacgcttttcgactgcaggaactggatttcgtctcctcttccacaatgcccatgcaaacagtaggtacccatgatgaatttagaatgtaaatagatagaactcaacaagctttctaactgtagtttaaggaaagggcaagagatggcttggctgtcagcagaagtgcctggaaatagcttagcaagggtacaaagacccttagcctttgtaattaagaagtttttgtgtctctgccttcctaagaggcacagaataggcatagataatggaaacttaagacccaaaaagaaaaatattactagaacacagagtcattatctgcagtcccagatttcctgcttccccattgtgggcaaaggggtctctccatcagacctaagtctttcaaagtgttatatatgaattgggatcctggagagtttggaggagggaccaatatatgtatatgtgtggtgtcaggtacagaattggtaccagtgaatggtagctgctattattatactgaatgcaagtataaaggagagcagactggaaagagtggaagtgagtgaaatactaagtgcacaaagagtcatattgtagtgtgtgttcaccctactcttttacactagagtcataataagaggaagtggactcaggatagagggtgggatttattggttagaaggaggaacttctttaaaaccaggttggttaaagttgagtatgtaactgaaggaaattgtagaatctgcttccctatatacctttatttttatccacccaggctggagggcagtggtgtgatcataactcactgcagcctcgagctggcctcaagccatcctgtacttcagcttctcaagtagctgggaccacatgcgtgtgccaccatgcccagcgaatttttttttttactttttgtagagatctcactgtgttgctagggctggtctcaaactcctggctccaatatatcctcccaccttggcctcccaaagtgctgagattacaggcatgaaccaccatgcctgaactctcctcaccatttttgttgaggtaaatttagaggcagaatggtatagtaattaagagtggatcttggaatcagacaaaattagattcaaatcctgcttc

SEQ ID NO: 1202 - DNA, 2280 bp, Homo sapiens
gctcggggaggggctgcagctccgtcagcccggcagagccaccctgagctcggtgagagcaaagccagagcccccagtcctttgctcgccggcttgctagctctctcgatcactccctcccttcctcccgcccttcctcccggcggccgcggcggcgctggggaagcggtgaagaggagtggcccggccctggaagaatgcggctctgacaaggggacagaacccagcgcagtctccccacggtttaagcagcactagtgaagcccaggcaacccaaccgtgcctgtctcggaccccgcacccaaaccactggaggtcctgatcgatctgcccaccggagcctccgggcttcgacatgctggaggagccccggccgcggcctccgccctcgggcctcgcgggtctcctgttcctggcgttgtgcagtcgggctctaagcaatgagattctgggcctgaagttgcctggcgagccgccgctgacggccaacaccgtgtgcttgacgctgtccggcctgagcaagcggcagctaggcctgtgcctgcgcaaccccgacgtgacggcgtccgcgcttcagggtctgcacatcgcggtccacgagtgtcagcaccagctgcgcgaccagcgctggaactgctccgcgcttgagggcggcggccgcctgccgcaccacagcgccatcctcaagcgcggtttccgagaaagtgctttttccttctccatgctggctgctggggtcatgcacgcagtagccacggcctgcagcctgggcaagctggtgagctgtggctgtggctggaagggcagtggtgagcaggatcggctgagggccaaactgctgcagctgcaggcactgtcccgaggcaagagtttcccccactctctgcccagccctggccctggctcaagccccagccctggcccccaggacacatgggaatggggtggctgtaaccatgacatggactttggagagaagttctctcgggatttcttggattccagggaagctccccgggacatccaggcacgaatgcgaatccacaacaacagggtggggcgccaggtggtaactgaaaacctgaagcggaaatgcaagtgtcatggcacatcaggcagctgccagttcaagacatgctggagggcggccccagagttccgggcagtgggggcggcgttgagggagcggctgggccgggccatcttcattgatacccacaaccgcaattctggagccttccagccccgtctgcgtccccgtcgcctctcaggagagctggtctactttgagaagtctcctgacttctgtgagcgagaccccactatgggctccccagggacaaggggccgggcctgcaacaagaccagccgcctgttggatggctgtggcagcctgtgctgtggccgtgggcacaacgtgctccggcagacacgagttgagcgctgccattgccgcttccactggtgctgctatgtgctgtgtgatgagtgcaaggttacagagtgggtgaatgtgtgtaagtgagggtcagccttaccttggggctggggaagaggactgtgtgagaggggcgccttttcagccctttgctctgatttccttccaaggtcactcttggtccctggaagcttaaagtatctacctggaaacagctttaggggtggtgggggtcaggtggactctgggatgtgtagccttctccccaacaattggagggtcttgaggggaagctgccacccctcttctgctccttagacacctgaatggactaagatgaaatgcactgtattgctcctcccacttctcaactccagagcccctttaaccctgattcatactccttttggctggggagtccctatagtttcaccactcctctcccttgagggataaccccaggcactgtttggagccataagatctgtatctagaaagagatcacccactcctatgtactatccccaaactcctttactgcagcctgggctccctcttgtgggataatgggagacagtggtagagaggtttttcttgggaaagagacagagtgctgaggggcactctcccctgaatcctcagagagttgtctgtccaggcccttagggaagttgtctccttccattcagatgttaatggggaccctccaaaggaaggggttttcccatgactcttggagcctctttttccttcttcagcaggaagggtgggaagggataatttatcatactgagacttgttcttggttcctgtttgaaactaaaataaattaagttactgga

SEQ ID NO: 1203 - protein, 389 aa, Homo sapiens
MLEEPRPRPPPSGLAGLLFLALCSRALSNEILGLKLPGEPPLTANTVCLTLSGLSKRQLGLCLRNPDVTASALQGLHIAVHECQHQLRDQRWNCSALEGGGRLPHHSAILKRGFRESAFSFSMLAAGVMHAVATACSLGKLVSCGCGWKGSGEQDRLRAKLLQLQALSRGKSFPHSLPSPGPGSSPSPGPQDTWEWGGCNHDMDFGEKFSRDFLDSREAPRDIQARMRIHNNRVGRQVVTENLKRKCKCHGTSGSCQFKTCWRAAPEFRAVGAALRERLGRAIFIDTHNRNSGAFQPRLRPRRLSGELVYFEKSPDFCERDPTMGSPGTRGRACNKTSRLLDGCGSLCCGRGHNVLRQTRVERCHCRFHWCCYVLCDECKVTEWVNVCK

SEQ ID NO: 1204 - DNA, 91609 bp, Mus musculus
  misc_feature (1)...(91609): n = A,T,C or G
gaggaacagctggctttgctgagccttggtacttcacgctcatctatccactccctctgtgatgactggtgcagcaatggatgctggcatctggcaccgctgtgtgctcgagggtttcagcctgtttgactctctaacccacttgcagccttgaagacagctcagagaatgagtgacagagggattgagtctaatgttgattgaaagacaaacaaacacacaaacaaaaatttaaagaagaaagaccctacttctgtgctgtatcccagctctcctgccaacttgttgtgtggtctgacgtgtgacatggcgtgatgaagacttgttgtgtggccagatgtatgacatggcgtgatgaagacttgtgtggccagatgtatgacatggcatgatgaagacttgtggggcctgatgcgtgacatagagtggtgaagagttgttgtggggcctgatgtatgacttggagtgatggagacctgttgtgggtcctgatgtgtgacacgggtgaaggagatggtccctttctctcagggctgtggtgaatgagcgaatggcagtagcacatcttatgttggatcagtgcagatgctgatgccacctttactcccttagccttctgcctctcacctttcccggcccccatgaggattcttacatctcctctcctacccttgcccaccccagtgtttatgccactactgcatttcttgaagcctctttctgcttaggagtgacctttctcatgccatccacccatatgagttacaaagaattgctaaaaatgtgagtcaaaaagagggacagacatagaaccatgccataaagcattgaggggaacctgtccttctgaggcagacccagctctctcagtctatgcatcgctagcttctagaaagtactatttacaaactgaaacagacttaaagttaaatcaagatgagtacttatgtaagtggaagcaatgcaatttgattataattccaaagataaatatgataattcataaacggaagagtggtggttttggttctatctgtcataccaaagaattgccattttctcctaatttggagctctctctgtctttctctctctctctctctctctctctctctctctctctctctctctctctctctctctctctctctctctctctctctctgtgtcttctctctgtctgtcttctctctgtctatcttctctctgtcttctctttttttgtctgttctctctctctctctctctctctctctctctctctctctctctctctctctctctctctctctctcttgtggtgttctctagtaataattttagagctttggtttcttgtgaaaaaagaaagaaaaactaaagaactataagaatatgtttttgatttagtcccagctgtgggttatgggactgcttcagatggtccaccacagctgattatgattttcctcgagttctagcaggggtgtgattttgccagctgcagatagtttttgtgattgtgtgacatttgagattctgggaactttttatatggtctataaatgctcatgcccaggaaggcatggggagttatttttcggttgttggttgttgttgttcttgggtttttttgtttgtttgttttgttttgttttttttggttatgtacaaagaagatataacaacaagaagaaattaaatatcctgacagctaagatcaaacttgtcccaaggaaatccatgcccctaatcagcaggaagtagtctaatgataatgtcatatcctttcccctctatcccttttccctctgctgtctactgtgagggggttgaaagggtggaaagggggtagacaaggctgtaagaaagaagaacccatgtagtgccacagcagccaaagtccagctacagtgtctcgcctcttgttttctttctttctattctttctttcttttgtgtgcatgtctgtcatttttgataagatctcccactaaacctgaagctcactgcttaggttatgtcagattgcttgtaggatccacctatctcttgcctcttcaccccctggtgctggagttacagacaattactgccatacctaactttcacatgggttctgaactcatttctcttctcttctcttctcttctcttatcttatcttctcttctcttctcttctctaccnnnnnnnnnnnnnnnnnnnnnnnnnnnnnnnnnnnnnnnnnnnnnnnnnnnnnnnnnnnnnnnnnnnnnnnnnnnnnnnnnnnnnnnnnnnnnnnnnnnnnnnnnnnnnnnnnnnnnnnnnnnnnnnnnnnnnnnnnnnnnnnnnnnnnnnnnnnnnnnnnnnnnnnnnnnnnnnnnnnnnnnnnnnnnnnnnnnnnnnnnnnnnnnnnnnnnnnnnnnnnnnnnnnnnnnnnnnnnnnnnnnnnnnnnnnnnnnnnnnnnnnnnnnnnnnnnnnnnnnnnnnnnnnnnaaacccccctatcccatcccccttcccttgctcaccaacccacccactcctgcttccctgtcttggcattcccctacactggggcactgagcctttacaggatgaagagcctcccctcccattgatgtccaacaaggtcatcctctgctacatatgtggctggagccatgagtccctccatgtatactctttggttggtggtttagtccctgggagccctgggggtactgactggttcatattgttgttcctcctatggagctgcaaacctgttcagcactttgggtcctttctctaacttatccattggggatcccgtgctcagtccaatggttggctgcgggcatccacctctgtatttgtcaggcactgggagagctctcaggaggatgctatatcaggctcctgtcagcaagcactttttggcatccacaatgtgtaacaagtacttttcccaaacagagccatcttcccatccccctgatccagctttctctgatggtatcttcaatagataaagaaatgccttgagctggccctgtggctacccactgagcaagactaagaagcaaacattatactaacatttcggatcaagcacttccagcccagagcagaccttctggttgggttggtgtgccccatctatagcctgcttgccacatgcaccccagctctgaatgcaacacaatataaaatggtaattggacttaaaatatgaggctttttaaagccatttctttctttttgtcagtcaattgcatggctcccaagtgtgaactttatatatagtggcatcatggaataatgtcaaaagattgctccccaacctcagaaggtcactagaaagaacatgagcagtagatatagtgttctgtgctatgatttttaaaatgtatttgctgcagctggtaagccacagtggcacttaattaaagtgggaaaggtatagctggaacatttaaaataaaagcgtgcagcactgcactgtttacatgcagtccagcatgagaggcacagctcagctctgatcctcctccaagtgttcaggagccactgccctctctcacttaggcccttaatttacagagcaagccctacaagccgggaccaaaggcagagcacactcagcccaactgtgcctgaacctgcccagatagagggcttgcctgcagccatgcgccatcttttgtgttgtagtgtgacacagtgaagcaagcccaaagagttaggaaagacaaaggactggcataaaaatgctcaacttaaaacgtaggtgacaacctttgctgctccttaagggcattgcacagtggactgggagaagtcagacgatttgggtagattgctcaagtggggttttcatcggtcagctggtgaatgggtatcaggatacctggcatggaactaatgagatggttcagcggatgaagcactgctacacaagcataagtatccgagtctggagtttcagcactcacaaaaaaagccctagtaaggcactgcacccttggaatcccggtgctagtcaggtggaggcagaaggatccctgaggctcaccagtcagctagtctagcaaatcagcaagcttcatgttcagggagagcccctggctcaaaaaaaaatgaggtggagagtaatagaagacacattgatttctggctccccgtaggcatgagtgcgtgtgtgcacatgcatgattggaaacacatatacaaacaaaaacatgtacttgatgatagtaaatagtaatggcaggcatgactgactgaacattattgaacaaggattttctgaaggccttcacattgtaaccagggaccaccgttcttcctactttgcagctgagggaagcactcagagaggtttagtagctttgccagtgtcacacaggtgggaggtaggagaacagggcaatgttctgcagaggaaggctgtacagctggtgctgtcgctaactcagccatacttgcataaggacccagggaagtgatattaccatcatgagtgggaaatggccctggtgagtggcagatgatgccagaagatcacaagaaggctggggtgtcctagtgaggaactttaaagacttacaacatgctgagaacccttgctttctgttcctcttgatctttctgatcatggcaaagattaaatcctgctaacaggctgtcttgtccttgtactgtcccagtctgtttcagcctccccttttaaacagagagagcaggtgtcagagactccaggaagtaataacatctagccagtctttataaaaccatttcctgctatctttattgtcatgctgaggagatgctggcttttcatgatataggccatgcaaatatttctcttcaaatgcagtttgtgctaacccctttagaggaaacaagaacaaggtgtcactgagacatttcaaagctaacaaaagttggggaaaggaaggttgattgctgagtgaatggtggccttttgcaggttttcggttcatatacaacccatggttcacactcaacacatgccaaggtcactggggagagaagaatgccattctcgcttctagtttgttaagaagtgaagcaagccttttgtgggctggataacactaatctttgcaccgaaactatgggtgttaaccaagcttgttctgagagctgatggctaaaatgggaggatgagaaagacattcatttctgtcttcattgaaccataaaaagtgagtcatgcaggataggctctggggtcagagcgtgcatcagaactgtgaggaagcagggccttccccataatggctatgctcagggcagcttctgggtggcttcttttgctacttcccaccctacccccagcatggtgagtctcttcccatagcagcaactggactccgtggcaatccctgaagtatgaactgagtcatggtagaactcagtaactcaaagtttgcagacatttccccaatgtaccaccattagacggaacaccatgaattgcagagagactccacaaagggaaaggcagagatgattgtctccaagctccagtatgtaacatgattgtgtggtgcaattttccctggaaagagtatcactaggaaggtaagcagcccaggtctactgtaacagtcagctagaaacgttctggaagaggaagaagtcccgaatcagttcagtcagctttcaccaggccgtgcttcaggagcaaacagtccttaatttcagaggctcccaacaactaaagcgtggacttcagggtttgactgagttttctcagtatgagctccataccaagaagcaaaggtgcatcttatagcaaagggacaaagagcgatgacaggaccatgggaaagctcttcatgcttctgcttggaaggtgacaggtgtgacttctactctgtacttattcaagttctcaggggaaggttctaagacaagagtctgagttcatttatatcatttgcaggaaatgctagtatcgaagtggaaagtgagccaaggaaggatcagtagctggggcagatgggtcatggagctccagaccaccccaggctaatgtgttgacccttttaagcttgttgatcatcgctgcttcgtagaggtcagctccccagagctccaggctgtgtgaacacaggcagactgaccttctcatttctgatgggctgtaggtaaagtcagagacactagcaggtggctgcttgcctgatgtcactggagtgatatggcatgagatatgagggcatgagattgtggacatttcattggcaacacatgttttggggatgtgtgctgtctttccatgaagaaatagaaaacattgaaaatgaaggcacagtttctgcaggaagtatgaactctgaggtattaaatgctgggaaatctttagtggtagaaagtggacatgtagacacaggggtggggttcatctatgctttgcaggatccctccctcacctgcacaaagctacttctgaatccttccttctacaatgactaaaatgatcagatattgccaactgcccctaggtggaaaatttaccctctaacaaaccagtgctgcacactgctatttctcaaggagttgcctgctgaaagatgtcatggcttaataggagaaacaagacaattgatataggagctacagtggtagccacccagaggtgctcgagtctgttcagataacttcacagtgaaacagaaattctttgagaatgggaatatcagctatcttaagggcgggatgtccaggggagactctagagataataacatctgtagatcttgaaggcgatggggcattttccagatgagcatgggcctttgtgtagcttgtgatgagaagggataagaaaatgacaggtgggggcatttgttcaacagtatgcaggttttctccctactttagctccaaccctggcttgaaaccctaccaaaaaagcatgttggcagcaagtcactttctttctgtgcattgtaagaagttcctataaagcaccttctttcagggtcagtcttgtccatcattcccagatgaccagattagttagcagcattcctgagcaacctgtatcctagaattccatcacttgggggaatccctcatctgtctcccaatctcaagagtatctctgacaaactatgcatattagaaagtatagcccccttgattgtgagtgggtcactctcatcaacgtgttccaggtgtttcctgtccacagtcccttcctttctcataatcaggcttctggctgctggctgcctgctgctggctgccacctactcaagcctgcatgatggggagcagggcgagtctgtcttacagggtggaatctgaattttctgcctgggcgatgcctgactaatccattaaccagctgtctcctctgcacattcccagaagatggctttctttccattcctagtctaccctactcccacctccaccatgttccatcctttctccttactcatgccccacctgtacccttctgtagggaggcagcactccttcccaataagagatcatgtaggacagctcaccattggcctactgttcaaactgaggaatgttacccagcctctctggacattttccttctctttttttatgaatgggactatagcagtacccacttacaggggtgggaagatttaaagaagtcagatacctgggaagtatttccgatgtggctagcacatggaaagccttccatgacagccagctagcgtcagtggtccaaagtgataaatgtcagctaaagagaacctagagtctgtgactagatgtggatgtagtcaagctactaggaagctgggtgcaggaaatccagtccatcatgcctctgctgtgattccaatatcaatctgcagcagcaaaatggcctctgagggaattaagggctcagaaaggaatggcaatattcttgcccaagaagtatttatgaaacgatcagataaatgccaatgatggtgataatagtcacactgtagcccatgttctcttccaggcttttctgcacctgacaactgattacatttttaccacagtcccatgcattgttattactgtcagaaattctccttgtgtgaatgatgtgtttgggattcagtgtggttaaaacaatttgcctaaggtcatgcaggtcgtaattgtcagaaggagaactgaatgtgtcttgggctgtgctccggcagatgtcatcatgtgcactaattcagattatccagctatgtccatttatagctgtgattaggaccaagctaggtacatgtctttctcagatgcaataatgcctgtgaaattttggattgggacggaagtggcccacagtgaggctagacatactctatgaaacagccacacattaagaggactagttgggagatctaaaacttaaggaactctgcacagtcacatcaattcatctgtgaaatgttcatggtttccatattctggggcagatagccccagtttgggtatccctagatgaaaatagaggctctgctcttcacaccacacagatgattcacacagatggtcaccaggcagatgattctatgtggcaggtggacagactcccaccaccttctgacaaaagcctttccatagcttctacagcataagacaacatccaactgtgtagctcactgcagttgctcctctttgaacctgaaaccaacacccagtttggagtgcctgccacagctgtgtgagcattgctcaggagccacccacgtgcatgatagtgagtatgctccctggactccttaaacataggatgcatgcagtgttcacaaaaggaaagtagacaggttctttgtgaccttgggagttgcttgactaaatgaagtgatgttgaatctctctctctctctctctctctctctctctctctctctctctctctctcttttcccttattccctctctcttaccccctttctccatctctacattccttccttccatctctctaaatctattgttatgtatgaatattggcactattatgccacaatgcccatatggaggcccttcctccttgtttgaggcacagtctcttgtttgctgcttcgtacactggtcctagagcttctggggcctttactgtctctacctcccaaatcagcataggaaccctaagacaagcaccactgcacctaggtttgcatgggtgcaggagagctaaccccagacccatgcactcctgtgacaagcactatacccacagagccatcaccatccaggtccttgatgagattcttcacagtggatcttttcagaacgtttggtccccagattcacattgtcaccaagagcatctctgctcattcacgttatcaccaagagcatgcatctctttccagtccttggcccctttacctttagaatgaggagtgcttgaaggtgttagtaatattcagagagacacagcctggggaaagatgttcctatcagaggaggccatgaaggtgcttaggtgccaaagctgagttccttgggtagactccattgagttaaataaaccacagaccattgagactgtgcatgtagagggagtctcagatgctgaactaatcctgggtattgataccgagataagtccgaggcaaacttcaaatgagcatggctttaaggagttaagtggttggttcatgatgatgcttggaagaagaatgtttagaaaatgaaaccagggaggagcacgtgatgaatggctaggggccaggcaactttgctaggctcaggagctggctgctgacctgtgggctagctcttggaaattcactgggtctatgaagaagatagatctggctcttgttcacagagagaagagggacatcaaaggccccaaatggtcccgatgaggcttctttcaattcctgtaagttatgcaatgtacaaacaaacacctagcaaccttgggggttggagccaaatgacagccctcaataggacagcatgtgacttctttgacatcaaaacactggataggtaagctttaaaatacccaacttcatgctggggatggacagttgagctcattccagaacttggaagccagtgcacttctacagctgagagaatggtcaggtcagacatttgggttggggcatgatatgggtgggctgtgaatggtaatgtgtagggacaaagaattttatacccggaaaagtgaagacatgtcaagaaggagggatgaatgggaaggaacacggaagggaagcaaggtggatgggagggagggtaggttattaaagatgtgtgagaaccaatgttggcagttggcaacatctgcctactatggctaagctgaccttgcttaaaaatggagagactctgtgagcaaaagggtgaaaagcggctgtatagtaagtgcttaggaaatgtctctggatagtgtgttatatgtggaggtctctgaacctttgtgtacaatgagaatccaggcatctcacggcacacttctcaatgtccatgtgccttttgggtttgaatctcttttactgatgctcatctttctacctgaagttttttttttctccttgaatgactcctaagtcacatgtctgtgagatgctcagtggtgtgttgggaaagctggatcgtcaaccaaaccatcatccatgactttctcatataacgcgtcagcatacagaggggaggtgatgtgtgctgagttgacccacgggttctattttgtagaggttcaaaggcgagcatcatcagcaatcactgctgaagaactgctgaagaacaggttcagatgaaactccacacatcacagcgctgctgtcttatctgtctgtcatgtgacagctctcactgtacttgcagagacagggcagaacaagagatgctactgaaattttattttcagttatccttgctgaaagcactgcaggccaaagattgatgcccaagttaagagactctctggtcttggtgtgctgggaaagagcagctggcttagtgttgatggtgaaaaggtagttttctagcattgcaaaatccacgaactatctgctcttatgttatctttggaaccttgtagaatatgcttcttcccttcttacaacaaacacagtgtgggagttacaccagcccacctcactccctcagctaacttcctcttcaagttactcttccctttccagatgtggaaagaaaatggtggggcaaccccagttcttccacacacctttgctaggctcttggcatagttttagggggacactgtaattagacaaccttctaatacttcattcttttacatgctggttcctagcttcagaagtccaagaaagtgatttaaaaaaaatcaaacaaacaaaaaacagaagctactggtagcagtggttcaggaaaccaaaaagaaccacatagattttgagcgaggactgtcttgttgcacggaggtaatacacatcaaaacctccaagtatgtccccttccactcattacgtaggaggaaacatctggaactgtcttttgcagttttgctcttaagcctgtctttaaggttgtctctctcactttttgttttaaggaaaatggacttagaccattttactgtagaatcttatttaactcacttctagccttggacattgtagataatgaccactcttaggtcgagaggacaaggcactagatgtacttcatactcgaatttttaaacacactggagtcgacgcatgggaacgtagatatggaattctgttttttctggttcttacttcactcttgctgggccacttgcttagccttttcttgatttaactgggctgtttctagtcctcttgattcataactagcatggaaaagacttgtctttgttggtatgacattttatcttcttagagataactccatgaaccatatttgaaaaacatggttactaggcccatgaatgcaatttaaaatactccctaccaatttccagcaagagcaagcctggattgaatggctacctatggtgtcacgtgtgcttctctgcatgaagctacactctcgaatggtttaagtcactctcctctgatttactgtcatactaggaacctgaaagtaaagttaattaggtatgcttaagtaaacagtttaagtttgctaagaaaataagttaagtaatgcttactagtttttagtaaaaaaatactattttatatatacatatatgtatacatataaacacacacatataaacaaacatatatgtgtaaacaaagctccataatgggcagtgtttccactttctacataagacagcaactgcccattgtgacctaatttgtccaaggtgcaagttcatagccagcctcactctgaaattgagtctcaacccttgctgttttcagtacaagaaaagactggcagagagacatggatgcatctctcccaggagctgattgcctggattggtgttagttatggaagaaaatagacaaaggagtgttgggatggctagagtggagatgtcggaagagggagaccagggcttcacagtgctgcaactctgacagtaaacctgtcttggctggtgtcatctgcagaattctggccataggtcttttatcctgaaggcaaattctaccctttagacctttctacaaccgaatggaagaaagtgagctcacactggccaaggcaccaatagaaggaaaatgttctttgaagaagccttatttttgtttgattcttggaaattttatgtcacactccatcactgatttatatttatttctacatgagtgtctgacactaccaatttcttggcttctaatgtgtaatcatttataaatttcataatagaaattctttttaggaaaatcaaattcattataagacattttcagttttcagaaatgtttaaatgggagaaagtatgtatcttagaataaaaccaaaaccaaaaacattccttggagatgtgtggtgtttctagtgggcccagagctgtcttctggcacacagctgtgagcatgctgtggatggcaagtcctcagtagacggtgcacatctgtaaatgttattggggcgtcagtggtgagataggtagagtggggagtgtgaggggttctgaggctctccttatgttttttagctctcctcgtttccacccagtaggatatttctacttgtcattaattgcctttgggcccagatagtctctgttgtaggacagctatggttagcaacactcctggctggtaaccactatagcatctcttcctttagatgggacaacccatgcctccacaaaactgccagtgtcagggcagaagatagacttctggaaaggtatctgataaaaccctcttgaacttaggctctgctcttcattctaggaggtttcttttctaggatgtcacccacaagacacagttatgtcacctactaatgggtttgtatcttggtccccctctatttgatgtttgccgaggcttactgagagaaatatctggtcatttaaggtaggaatcaaacacttgtttcctaacttagtgtgacaatggggggagatctgagtttatcctcataggaagtaccgtctagcagggacggtgggagtctgacacacagaggattagacccaggcggttgagttgggaaggcttctaagagaaggtagtgctgcaccttggtgagaaggatgagcaggagccgccaggagaagggagggtgtggagccttgctcgccagcatttgtatggatgtctctagtagtcatagccaaatcatcaggatgacaggacaggagagggtcaaggaggacagcctcacccgcccatctcagaggttcttcaacagctgcacttactgtgtgctttatttctgtgcatgtaagctgcacttgaaactgaatatgtctttgtgtaatagagtcaccattgtagatgattatagtgtatgaaactatatgcaccaacgtttcagaagtgttaagtgttaaacaagccagagacagaattctgagttactgtatacagtggtccctggttgtaaaccttttcacctgcctgggttttctagccctttaagcttctttccataaggcatattcaactttctcttttttgtctattgaatgcacacttaacatactcccgaaggcactttatcttgtaaattcactaaatattatttgcataccacacaacatttagcttaacattttcttgggactattgctaagtaagttgctgggagaacacaagtttatattgttatcaaaatcctatggcctgggatgtcctccgaatagacctactccacagtctcagcagaaactgaagtcccaccagggacagtaagagcactctggccactccaggaagtggagaagggatcaaaatgtcccatgacctctctggagatggcatcgtgtagacagtggagcaccagcttccaactagggtctctagaacagattctgtttctgcccctccctaggtacctgatcattaatatcccacttaattttctgagccccccatggtctcctctgtgaagtagtactatgataggaactgttttaatgagctatttggaccgtgatgccagactcacgtaagtattaactgtcattaatatgctgttgctattcatctctcagatgaacctgggtcagtgaattgttgttggttggattagaccactggagaggtcagatacacacaaaaaggatataagatgttatctggacgagaaaaagggactcacaaaccctaagaagaagagctattgacggttgatgacttctgggggcggggggagtcagttttactgaaagtccggtctctcacactccagtggatagccccacaccaatgaatatataggcagtattagttggacttggtggtttatttttaaaagaacatgaaatttggtgtgggggaacgaagtggatagatctgggaagagttaggggaagagttaaagggtgattacaattaaaatacattgcatacatgtgtggaaatgtaaaagaattaattaaatgtcattagaattattctttgaattctaaagaaaaaaaaaacctataacaaaaccctgttctcagagggatggcatgtttaagattagtgtggctgaaataacagaatcttcaattccttgtacaacattttctggctgagaattgagggggcttcagtggctcacgagaagtttcaagcatcttctaatcaggtttgatcagtcatccaggtctattggagtcaatcatcaaaggacttgttgcctaagccaagctctttgagttgtgaaatcttatcagtgtgcatctctgccaagatccccaggtgcttcaggcccaggtcgagctcaaatcaaaagccaggacctagcgcaggacagccttgggattccaacctagctctgtgatttattagtcatatgacgtcgaacaagtttcacaaccccagcctctctgtcttctcaattaacctggagtaaattgtttgtgtctttggggtaactgagaatttatagaaacagaggttgcaaagcacacggcatctcactgcacttggggcagacagtcaataaaggtgacaacgcctgtgcctgcctcccacacctacatgataaagcaaggcaggaccagagagtctctgaggctcttcatttgtcaaaagcaaactaaagaaagaatcaaatgcagaggctggctcagcctctagggactgggctatgttctctgcagatttgaccatcagtctccctcgatgaaaaacaggacatcagaatttcctggttcacgtcagacagtggttatgagacatgcagctttgtactcagcccttggcataggcgaccccatccagtgttctcactttagggtcagagatgctgacagcttatttacagttctagtcagtggtagagctaggatgtgtatgataaggacatttctggtgtccatgtttgtaaccaccccaaacaacctagacttctgacactggctggaaagaaatgtagaaaatggatgggaatgactttttcatgcgcacagttctaaagctttctgagaccccaaactatcttctcatctctatgtcctctccaagcccatagcacttagactacagagacatctggtgaaagcagaaacatctaaccagatgtctgatgaggattctgagtaggcacacatgtatatgtctgtgtgtgcaagtacatgcgtgagcacgtgtatgaacatgcatgtggagaccagaggacagctgctgttattgttcctcaagtaatggtcctcagaactcaccaggatgaccagtaaatgtctgccttcctccacaaagcaaccttggccaagatgggcacacttgtggatgtgtattgagattgtgtctttggcaagcttggctaatcaatcatagaacacattctcagtgactctgaaatccacctcagaacactttgttccaggcatccatccactgtaagtgagctggatgctggccctggggtaaaatctcagtcacatccagttttgtctctaaagtgatataaacaccactgagataggttgtggagactgctcaagagattgtgtgcactgagttcctccgtctggccagggttaatgaggaaaatccctcagtagtgtccagaagctagagacagctgatctgtgagacacttgcctgccttaggtcttatggctcctttatgcttggctgctgtgggttttcctctcaggcatagctgtctctaagactcaagtttcgcctgtcttaagatctttttttttttcttcatgccttctctctgttggagagctggatagctcaaactccccagtccagactctggcacgggatctcttccactgtctaaccccactttaccctcacaactctctcctcagcctgtttaaagtgcatgaccttattctacttggggacaagttgcatggtgtcagttaagggccctggagaaatcttgtcaccaccttttctccattttgtctggtctcatctggcccatgagtctcattttcactcaccgagaaagtcacttctatctcctttatgctttttgaagggaacacgtgccactagccatagttcttatgagtaactgagtcactcgagtcacttgatggttaggaagtgcatcttataagccccttgtgacaatgaggcaatcgggccctaatggagcctagagtctgaccacatctgttattctcttggtcaagtgcctgcctctgccaccacatcagacctgctgtggtcaggggatccacactatcagacctcctcaactcggtgcatttgcccaatgttggctgaaatgtggcttctccttctgtctgggcagctatccattctataatatgccattcttagaaaggttcacttgaggatggagggttgtcagtaggaacaatgcaaggagcttatgttaggtgtgctttgcaatgctgcattcttggtatcaggcgcttgctggcatgggtgcctcagggggagagcagggagctaagatgtgagaagaacattacatggacttaagtgtcagcccctctgctgggagccttctattatctatgtctcagtggtctctgttgaaaaacaggtcttaaaacaaccccagcctgataaaatggttgtgagatttaaaggaataaaggatttttgactacagaatattgtacctcattggtacaaacattgatgattatttaaattttcctggcaacaggaatgaatattggattttacttttactttcacaactttctgtagaaaaaaatgcacattattcatataatttgaaaacaatacaatgaaacattattttttgcaataggaacagagtttcgttggtaaagggtgtattgttgttaatcctactagcttctatctttgcccattgtgggtacttcaggatttacttagtttaaggaggaagtctttactctcggtcctctgcatccctccctctgtctgtcttgcttgccaaccagtggaggctccaaccctcctgggtaatgttgggattggcttaggggagtagggagggaaatatggctgtgtgtgcaagaacagaagcaaggaaggaactgtttatggggtgttttacagtgagactgtaattggagctctggaacttagcaagagttataaggtgggataggcttaacaccaagcatcctgaggtagtgtagatggccctggcatggagaataactgtgtgtcacggtgtgtgtgtgtgcatgtgtgtgtgtgtgtgtgtgtgtgtgtgtgtgtgtgtgtgtgtgtgtagaagtggagggccaggtcctgaagacatggtgggtttagtaacttgtctgagactctgtatgtgcacagagcaggacatataggagtcccagttgtgaactccagtcacactctagggacattgtcattctgttcagaagtgtgccatgactgaacatggatgcacaggccaagcctggggctagtgtcttctgatactggaatgccagcatcaacaggtgtctcacctctgctattgaataaggggcagtgggattaaggtgagggaaggattccacagtttctaaaatttaaagggattaattttttcctgagcatacttttttataagatattttctttatttacatatcaaatgttatcccctttcctggtttcccctccgaaaaccccctattgaatcaccctttccctactcaccaaaccacccactcccacttcctggccctagcattcccctacactgtgacatagagccttcacgggaccaagggtctctcccccattgatgatcaacaaggctacatatgcagctagagccatgggtccctccatgtatactctttggttggtggtttagtccctgggagctctgagggtactaattggttcatattgttgtacctcctatggggctgcaaacccccttcaactccttgggtcctttctctagatcccccattggggatttggtgctcagtccaatgggttgctgtgagcatccacctctgtagttgtcaggcactggtagagcctctcaggagacagctatatcaggcttctgtcagcaagcacttgttggcatccacaatagtgcctgggtttggtgactgtatatgggatggatccccaggtggggcagtctctggatggcctttccttcaatctctgctccacactttatctctgtaactccttcttctatgggtattttattcccccttctaagaaggattgaagtatccacactttggtcttccttcttcttgagtttcatgtggtttgtgaattgtatcttgggtattctgagcttctgggctaatatccacttatctgtgagtgcatatcatgtgtgttcttttatgattgggttacctcactcaggatggtattttctaaagggattcaataaaagggattagcatgctatgtttcctgctggaagtggagaatccagagattgcatactctgctgagaggtaccttctgccagagaacatcctccatctctccaaggcagattgtgtgctttgattctcaaacacataaactctgcagtgctggggcagaaggttatcttttgtcaatatatgtaccacgtgagctggggaagggaggaggccacccatcagccaggctttgccagcctctgcctttgtacaggcagcttcttagattcattgttttaaaagtttaagagctctcttccattagaggtgaccaattctcaatctcttgacagaagtcttaactctgcagcacaatacagaagcataaaaacaaaaccctcagatgagtgtttgtgctgaacacctgccatgccagccctaaggaggcagagggggtggctgcaagctggaagccagacaggtctacatagtgagttctaggccatgcagtggtacagagcaaggccctgtcgcaaaagtaagcaaagaaaaacacaatacacctgtccctaaaactccagaaaatgtgtaataattctcttcacctattctcccaagactttcttccactctctccactctcagaggcaacccatgcaaataggttttttgtttgtttgtttgttttttgtttgtttgtttttactttgcaaaagttcttccatatatacagttgttcacatgcaggtacagttttcagtctccatgcagagtgcatctccatacttttgtatatcagcccactggttatcttttaaagaggtttttagtctttactgcatcagcaatgtagagaatgtattcaacatacgtactgtccaactctagcttattacacagttttggccacagaagcatttttcaaagagtagacatctttatgaatgaatacatttctctaaaacagtaaggagatattgtggtgtgccaaatgcatactttatgttgacggaaagcctgaaaacgctccacccacggtacctgcttggcctttcacattaagcatcttggtgtttgctcataatagaagttctcatctgtgtgcatgcactcatgtatttgtgcgttgtacgaacttgttagtaaaggtgtgtgtgcacatgtgcatgtacgtgtatgctgatgtgtggaccccagatgtctcccttccgtgtctgccctctgcctttattttatttttttatcttttggaggcgagggtctcatactgaacttgaagttcatccttggctaggctgggtggccggcgagcttccggagactgcctgctctcccatgacagtattggagttacaggtacatgacgccatgcctagattttcagtctgtgaatccaaatccgggtcctcatgcttacatcacgtgccgctaatctgctgagctatttccccagctctgacattatcgcctctttttctttttcttttcttttacttttcctttgtctctttgtggtgtgtgtgtgtgtgtgttatctatgtgtgtgtgtatggtgtgtggatatgactgtgtacatgcatggtgtgtgtttgtatgatgtggtgtgtgtgtgtgtgtgtgtatgtgtctgtgtgtgtgcatggtgcgtacatatgattgtgtgagtatacaggcacatgcagacattgctccctctatcaccctcttattgccttgagacagggtctctcaggaaagctagagttcactgggttgggctggattgtcagcagcctccctggatcggtctgtccctgccctgaccaatgtgggtgttgcaggcaccacaggcaaaggaagctttggctatgggtgctagggattcgaactcgtatcctcatgcttacataacaagaactctcacccactccttttcatcttatctcctcatttccccttatcagcttttgaaaatgttttgtcagctgaacatgcaaaggtcggtgcttgtgtttgcttggccctgagttgtaacgtgacagaagtttctgcatgttgtttgtgatactctgtactggtagacttttcaatgtaattccaaacactaatagggcaattccagaagcacctctccttcagggctgatgtttgccacagcatactttcatttgttggggttggtagttatagacacccaccctgtagatgaaatcccacagcccaaggcttcctctggcccccttgtcaattccaagtctcagtacctctatcccatcccctgcctctgtggcctggctcacagacctcccctgaacagccattgaaggccaatatagcactacagaggacttggaagaccctgctctaaaacaagcccagcctccatctagatagcttggcatcttgatgtccttcattttcaaatttcccacaatcctctcttccctccccatcaggtactcaatgcacatctctcctgatagttctaagatgttcaccgaagcctctcctcattggttgcttgaacggctttctctttgctcatgatggctggtgttctaggattgtacttatataatttccttctgatcttaggtgctacactgtaattcaagaaggcatagatactgaggtgaccctcatgtcacttgttatgtaagagtctagaaagccactttggagttggtagagtttttgaggaagtctgtgcatttccttgaactgatttttatgttgtttcttggtcagtgactgttcaaggaacatccccttaattcagagatggctttggggccagagaagagaaaaaatgatggtgttgatggatggctattgtgcagcacacacttactaactaatagcctaccctcctcaacggactccctccacacttagagtggataaggaaacaagctcttgggggttagagtgatttactaagaactatatagctatcgagtggtaaaacaatctcataaggttgtgtgtgtgtgaagttggtgtgcatggtatatgtatgcatgtgtacagttgtgtatgaggtatttgtgtgtggatggtatgtgtataggcatgtgtgtgtgtttatatgtgtttgcatgcatacctcctctgtgtgtgtgtgtgtgtgtgtgtgtgtgtgtgtgtgtgcgcgcgcgcgcatgtgcacaggcatgtgtatgtatgtaggatgggagagtggtgcccagttggaccagtcatctgtttcacgtcccattctcttgaagtccaaactttgtccactgacttcagcaaatcggacatggacaaggctcaggcctttctaaggacatcatgtacacccagaggccagactgaggccagaactttgatctctgtgccaaggatgctctgcgttggacctgctgtgctgtgatgatcagaggtggggtcttggtggctggacttttggactctcttaagtcatttttttctcatttgctgcagctttgcactgagctaggatatttttcccaaagagcaggtcatatgtaacatgtgcctggcgtgagctgggtcctgtgactccttctctctgcttagggaatgatatgtaaacagaaagtgtgcatcaactattgagcatccacaatagtgggtatcaccaaacatgaaaggcacaaaaggacacctacccagataatctgaggcaatgtattctggttatgtaacattctggaccatcgagagtgagagtgatggctaacccccaaaaaaggtatgccattaaacatacgtgtgataacgtcctctaaaattttaatcataacactgcaacataataaacttagatggtaaaatagtagaagcatgtgaaagtgtaggtagtgaccggtgagaccctctcctcacatgcaatggccctggagttctcccggagagccaactatcatatgttccactgtcctggaaagaatgattgtaatctttgtggatgtacaataaatgtacccattatttatttcttttgaatccagttatccatccattcctcataagcctaattctttgggagaaaaaaaataatgcaagaaatgcttaaatttaataatctcttgtttggggctgtgtgagaaccagtacactccgaatagagggtcttgggttcctgggtccttgggtcctgagacccaggcttcattataaagtccctcagctatggaagaagtaacatggacccctacgccaaagatgtccttgatggcttttgtttacataaactacactattcatctcctgggtcctatcttgttgaaagtagcatataagaagttatcctttgtcagtgatagttccagttaggtgcgagtccatggaacctgggcttcaggaagtcttccctagctcattcgttaccatagaagaatgtcaacttataatgttggtctccataggaatacagcctgattgcatatgataacttgctggataaccaaacactctaccaacaaggtaatcagttttgtctgcagcaatgttttccccagttaagtggcaagagcaaagggccagggctgaaagatatctcaccccattcttcataatttactccaaattgcccacaggagaagccaataagctgctgagcatgatccccaaagaatgttctctagagagtaattcagtgtttctgaaaggcatgaaacgaacctgttttatctgttcctatccagctattctggagagctctggactgacccctttagtaggttctagcttctatgactcgctgtgatttttaacagttaagtcttaatggggacataattaaataattatgtttctctcgaatgattgttttactttagttgtggcagatgcctaaccttacctggtttaaatgaaggagattaccttaggttactagctgaatattcaggctccattatgtacagaggctaaatcttatcgtcagaatgctttctcttccatgtctctctagcttcaaaaaagaagcagatgtctcccatgtgggctatagatgttctgaacaatctggttttaatttataacagttcagaaacctcaccaaaataatgtttttatcccccactacttatataaaaaagttttaggactgaatctcacaggatcagcttaattccagtactcaccttacacatcaagttttatgtcaacttgacacaagctagattcatcagagagaatggagtctcagttgaggaaatgtctttataagatccgtctgggaggcattttcttagttagtgatcaatggatgagggcccagcccattgcaggtgatgccattcctgggctggtggtttggattttataagaaagcaggctgagcaagtcatgatgagcaagccagtaagcagcactcctccatggcctctgcatcagctcctgcctctaggttcctgtcatgcttgagtttctgccctcactgttttcatgatgaactattacatggaaatgtgggtgaaataaaccattgcctcccccatgttaattttggtcagagtgtttcagcaataatattcctaactgagacactagcttttcatccttgtggttgtgggtggagcatcctgatattccagggctgagatggacagggcctcagctcctcccaaaccacaagaacaggagtgaaagaaggagaatcaagaagctagaaacaaaaagtagcatcaggccccaggcaggttcaagcaataggtttgtaatgtgaagtccaagtatttttttccataaagggccagttagcatttatattaatatttctgtttaaactacacagtttctgctcatggggaaaaatcctcgtgcagtagctaaactttgaactaagatgtgttttcatgaaaccttgtttatgggaacaatcggtgggctgggcattgtctgtgactgtagtttattgagcctggcctgtcaagtgtataaaatctttttcttctatataatctagaaagttcaacaaatcctacacaatatgtagaaagtattcaatggatattggttaccaacattatacagaagtaagggtaacaacaatgatagcattggtggtaattccgacagcactaacttagcaacaagatatgataaagtgtgagtcatatgtcagtaatgtacgctaggatgctttctttctgctggttgagcttcccctccatgaacacatagaactgagaggcagtgcccaggtaggttacacaaatactgtaatttatagttgagccctaaaatctggggaggtggctcagtgtggtaagagcacttgctgtgcaaacatgaggatccaagttcagattccaaatagccagctgtccatctgtaatcacagcacagagcacgaggggagacagaaaaatcactagagatcactaaccagccagcttggttgaacaaaaatgatgaaattcaagttcaatgagagaccttgtctcatgagactcagatgaagaatggtagatcagtatgctccgattcctcccctggccggcacataagcacatacaggcacatgcccccaacttcacccctaaaaatagatgagcccaaggctcagataaaaaaatgtcacatgcacaagttcacataacaagtttgggtggctgtggaatttgtgtgtttcctccagcccctcttgcagtcttgaagaactctgtcttccaggtatttggtatgcatagtgtatcagaacacaaatatacacaaatggatattctttaatgtctggatccaagcagggaaatgtggaagtattgttaagattcttgccgtgaccttgagctagtagaaagaactgatttgggtttggcggttgttgcatgagtctgggaaactccttgctgctaacatgactcagatgttcatctcacacaaagcttatgaaatgtcccttagcacatttgaaagcaaagaactgatagatgcttggtcactcgctgcattactgtccatccactttgctattgtttgaattggcttagcaggcaggaattgcttaagccactagtcctcaggttggctggtgtaaggattcccctcaaattccccatggctagagagaggcctgtgggaacttcttcgtgccctgaaatttactcatcaaattctctacaactctggaaatctctccctggcttttggttaagcaggcactctgcagtgatcacaggaagtggctaactctccagcccctgtttcccaccttttaggtttatccttactctcatcacccagatccacttacaaaacccattacaaaaatgattttcatgaatcaagaaacaaaccctagaacctttggccctcgagtgctttagagaactaggcagggttgggaatttggtttaccatttctctaagccaggggccagcaaacatttccatgatgagccatggtctgcaacttccactgaggtgatggtaggaccagaggacagaggagtatttgactaggctacccagttacttgagtatagtagcaaaacctgagcttttgatgttggagtgacatgagtttctcctgtggttgtgttgtttggtacatgatttcaggcaagctaaatgttctcaatatcttcatttaaatgtgagagttataataacatgacacagtcctgcccttctagcccttagagcggctcttaggaggatgaagcagaaaatagtcactgtcccccaaagctcttagatgttaatggtatcaccaggaccacttaacctgctgagtgagtgtatgagtgtagaggtaatctgctaaatcttgccacccacaagagttctctggattagcaaatgaaaacacacacacacacacacacacacacacacacacacacacannnnnnnnnnnnnnnnnnnncacacacacacacacacacacacacacacacggataattgagatcagttctgtgacccattaaggaaacaacatatgtggacattattctcatcttaaagatctaggctcttctagtcaccatgcacagtgaagagaactgggctttgatggagacagacaagagctgtgattcccaggcctaccctttctcagctacttgacaacaagcaagttagtcaacattgtccaaacactgactaaaggcattcctcacagtgtacaaaacatctcccgtaaaagatgctgtaaagccctgctgtcaagccagctcttataggctgtgagcacagcacacagtctatagcacctacccccacggtagacttgtaaagaaaaggctgaagtcatagctgggtgtctgagcacacactgagtcattactcttgagagatctacttttagaccattgataataaggagacagcagagaagaacacgaaggcccctccagcccctataacttgccagtcacatgttggtctttctttctgcattgcctcagaagtgagatcaatattgttttcacatttgtccctagggaatctactcagagttataaattatgtgacatccttggtaaaataaaagagattcactgttaaactacccgatgcttacgtttgaggatggtttcatctgtacagagagggaatccaattttagaggagccaggcaagagaaaatttatattccactagaaaagcatcacagagttcttgatgaagaatgttaattgatacttggtgtttttatcaggaaggcaatagagactggtggagactgttgtagtggagtcttgttgaaagtttttttttttctcatttctaactgacagctaccactcagaggtgaattacttaatggttatgtttttcatattttaagagatgtaaaatatggattttgaaatgaaaccaatctgcctttatgtgtggttagttcaaacataaaagcaacagccttgagccaaccaggtaagccactgattcaagacaaaaccttgccaaacttcaaattgaagggtttgtaagttgagcaggaacaaagctttcttcagagactcttggaaagaaaggcctttaacctgggtactcaggagtaaatgttaatgatgcagtggccagcacggtgcccttacctcttccagatagagagttatgatttgttagcatcttggactaagggaagaacaaaagttctttaaacaaaaatgtaccacataatttttctgggtaggttatgatgtaaacctcttctctttctctccataaagtacagtatctgtctcttactaatgaactgcagagttgggtctggtctcaagtaaggtacaaaaggctcagtgtatgctgaacgtagcctcagaaaaactgggagatcgtgggtggaggaagaaggcaagactgtgcaggacacaaaaagcctgacatttctgtcttcactcaaagcccctctctgtatgtgagtccagaggtctttttcaggaaacactgtagacctcatctaaccccattactgcattttgtcctaatgtttaattcaatcttccagttttactcaatacccaataaatggctgccactgtgcatgccatattatagaggatccaacaaagacagatgtgatctttgtttgcgtgtcataattctgagttgaccatgtaagtattgatgcaggaaaaacatttgccacgccccaaattgaagtttttacaaattgagtgtgagtgaaactttttttccagtacacttggaataagagccttttaactgagatgctcaggagtcaagcgttgatgatccagtggccaatatggtgactttttaccacttccaggctgatctgttagaatgactccatgatgttcataaaaagtggtaccacgacttcctgctacatgtaaaagacctagatgcctttggcagcagcatccttaggtgctacctgggaatcctgttgacttgtaggccaagagacttaagacatcctttctcatgattcctttatgcatcattctgaaggcttgtatatccataggataaactacttactccatgtttgactgcagaaggctccttcccttgcttctataggtgtctcgtagattccgtagacgtggatcactctaagaccctcaaatcattcctccctcgcccctttgtaccttacttgagaccagacccaactctgcagtccattagtaagagacagatactgtactttatggggagaaagagaagaggtttacatcataacctacccagaaaaattatgtggtacattttcgtttgaagaacttttgttcttcccttagtccaaggtgctaacaaatcataaaccataaatccctcaccctaactctgcacctcatatgcaatactgattcaatatctgtcaattcagccagtcaaaaatatgttaaacaaacaaagttatgcctgcagtgaatatatatggacctcactggtgtccttgtcaatatttctcaacctcagagattaacaattcacaggacagtcacgttacatgattcaggagtttcgtgtaaaaactaggccattttctctaagggacttttttgagtcctgaaattttggcatcgtcaggagttccaacacccatccacagatatctggttcggaataacaagtatgttctttccatcaagtctagtggaacctgcactgaggcatgaagcaagacatgtgactgggacaaattgtgtaatataagattggagagacataaaaagcagattaggggctctggaaggaactactccaagcacaacttcaaagagttgatgagaactctggtctaaatagggactaactcctaaaactccatgaactgcctatgtagattaaaaagtggggattgaagccttcgagacagttccacagctaaaaggttcttgctgccatgcctgacaacttgagtttgatccctggactcaacatggtgggaagagggaactgatttccacaagccactccttgcacgggtgctgtgacgcgcacatgcgcactgacatctccaccccacccaagcccgagtgtgtgtgtacacacaaacactttaagaatattagtggagatggttgaagaaggaagttgtattcttcctcattaatattgagcaccatgaaccaagctctccccacaagctctgggtatgagaaatgaccttttcctctgtagaaagaaatgtcttggtataacttcattcactgaaaccttacatatcaaattagttgagacttgaacactcaggcagtaagctggtggaatcaggagggactgaacttttagcaaccaatcaaaagctgctgctgtaatggcttgtaagaaagaaacaaagtaaggaatggtacaaatcctgtgggaggagtgaaatgcttgcttggatgatgggaggtatttagaggcagcctattacccagcatacagaggaagctgtacttttagtctgtattcatccaggtgatcaaagggggaagtaagttacagatctaagtttctgctggcatctcagtaagggatgctggcacgtcacagtttggcggacacactacctctgaacagggttctagaagttgcagatgagtagggattgacaggggactctcaaaggagaggaatgtgtgctgacctggccttgtccgctctctgctggttttccgaatgcagatggttctggcttcttgtaggataggactttactgtttgccattttcgttccctcttctctaattgtgttgttccattctcagacttctggattagtctatttctcaaaacagagtattgcacagaacttgtgacaagattatatactttatctatccatctgtccaacataaagttatcaaacatataatttccacataaatcatgctaactgtggggagaaaatatgagcgtcttattccagcatttgccttctgatgggggaaaacaagccataaactgcgagtgaggccttgaaaacagaagatatggtaacctgggtagggaggatctaactcttgaacttgagactcggtggatgcctttggatgaaagcatgcctgagttttgaaggtgatgtagatatcagttaagaaggctgggctggatagagggatgaaaagggtactttggccagaggagacaatttgccggaagtcacatggcctttactcatctggaaatgggtccatgttccctgtggctcaggacatactgcagggtctccctattttgttggagctgtgtgaggacttcagataacagtcccatgttccatgaacgagaggtgggtagcaatgatgctggaagtgtaccttcaagaactgggctggccagcatgctagtccatgtctaggccatgtgtcatctttatttttagaagcgactcccaatttggaatggacaaacatttaacccagccctaccctgaccctaggaactaactataccttggtgtgtaggtcgttatggaagtgtcaggtgtgtgaggtcaagacaacctgaagtgtctctcttcaggagggtttccctaaagtacagaggggtcatgattgtgctggctagttttatgccacttgacacaaggtaggatcatttgggaaaaaggactctgagttgaaaaaatatatttagagaattgacctgtatgcaaatctgtaaggcagtttctcttgatggttgataaaggaagatctagattactatgggtggtaccacccccaggcaggtggtcctttgtggtataggaaagcaggctgagcatcatagggagcaagtcagtaagcagtgttcctcactggtctctgcatcagcttctgcctccaggttcctgcctgagttcctgccctgacttctctcagtggtggagtgtggcctgcaagtgtaaatgaaataaaccctttccttcccatgttcccttaagttgaagttttcacagtaacagaaagctaactaagacactgaataatggttcgcctgatgttccatatgagactgtctggttattctaccttaaagagggccaaaggctgtgggaatttcttgggtccatcttacttggttaaagtattgtaaggtcactttgtagctaagtgggcttactaagacttaaacgtggctggctagcctgtcatcacagttgtcgcgccccattggaagcatttgagtgaaagggaagaaatcaaatccagtgccaactgtgtatcaaatactctattggtgcctttgcaaatattatctcccagaaggtctcagcctcctgacttgggacagcttaggccgtgctctaggtatcccctcaccattcagatacaaagcctggaggagctagtggaatgtgtagcaaccgtggtcattaggaccttgccagaaagcatttctgtggcttaatgactaggcactaggtctgaaaacggatcagataaaggaacccggggagactttggagtctgtaatgatgtgtgtaggatttgtgaagacatggtgactgtcagagagaggcttcatggcttagccaagccttacgggatacagcaagcagagggactttttgcatgctgtctaaatttcagtctgtcttagagtgccaagccctttacagcaataatgaagggtctcttgggggagctggggaaatctttgttgagggataatgttagccattctcaccaccacgtgatgtatgtgctcagaaggagtaccacaagcagaaacacaaagggggaagccagcaatcgtaatttttgttcttaagggtcggcctcccaggaaggtgatctggtgatatctgtgccccattgtgttttccagacccataggactggggctggactggggcaatggagggacagagaaaaaaatgtgttgtagacttcacaaactcagggcaaaatatgcaggcttcctggggaatgttctcttgccacctcactgagagagtgagggaggaaaaagaaggattggtgccacatgaggcgacatgcaagtgtgccgcaggacatcggaacccagcaccacatctaatgagcctgttattagaggctcttggcagagcgaggagaatcgagtgctaatgaaaagcagatacggcacaaacttagcatctctccaccacgagctctctttgagtcctggagcataatttacacaataagctggatttgccattgaaacaggacttgcgtgcatgtttgtgagagggggctgggtaacagttgcaacattagcagctgtttaactaatgcagtggagaagctaaggttaaaagaacttgtacgttcatggtaaaggtttagttatcccccacccctgggtgtcttgtcattacccttactttgttgggcaatggagaccaagagagagggtctggctgagccagcttccagtgttaagaatttagtgcctgctccttgatccaggatgtacccaagtaggaacagaggtgactagcattctctggggtgcagctcgggagttgcggtaagagtggggaagaacacggcgctgtggggttgctgtaccccaattccctgccttggtgttggaactccttttcaccctgttctatgtgcacagtgagtggacattaactaaaggatgcacacacacacttgaagtgaccgtgttgatgcaagggaactccgtagatcaggttctgccctttctgttcattaatcaggatgcaaacgattacagtattgagaacttaggccctccatctgtccatcttccttccttccagtagcaggcaggatctgggacaatcatcaaaactctgccacattcatgatggcactaggccccagcattacttatttgtcagccatctcaatcagaacacatgctaaaatccaacatttagatgtaaggggttatatctggtgggagtttttggttctaggatagctgtacaggtggccatatcatatttagtttactgacttgctaagctaagaacagatttcagaactcaaagaggctctgcattttctacaggctgatgctcacctatgccctagtcacgaaagctgccctgaccacttgatatagaagcatatacccacactgtctttacttctgtccagtgccgtcaccactgcagtaagcctatccacttgctctttctcccaactacacgagagcaagagcttttgttctgggtttattttgtttactgtactgctttcagtagctcttagagagtgggaactgcactgtgatcccagatgaaatccgaggcctggaggccaaatggtgcaggagtgctcaaacagtatgttgccaacatctggagaaaggagggcatcctggagaaagccgggtatctctcaggaatgcatttcaattcccagtttgtgcttatgtggaaggtcacaggcttgctctctcagggctcatagactggtaaaggatgcaggggtttaagctaagaaagagctttgagatccaggtcaggaatgtatccctccaagagacctttcctaaacacccgctatgccttccctaacctgaattagcataattcttgagattcctagtagcaacccattcaggactttatcacagcccagatgtgaagcagataattacagttcaccacactttctccccttttctaagcagaggctcttattacagagtataatgtctgaccagtggagaatagtcaataaatctatacatgttgttcatcattgctgctgtttgtttagtaaccagcacatgtgtatgttctaaagcgatgtaggctcagaagcagctctacactgtgctatgtaatcatctttggtattaatgtttcacattaatattctggaatcttctccttaggctccccttgtggcccaagagatgcagcaaatggccagacttatacatttttgcgtatagattggtgagctccttgcatccctggctgaaactgagtctctgatttagtttaaaatgtactcactgtgttgtcaagatggctcactgggtaaaagagtcgttgtttaagcccagcaacctgaaattaatccccaaagcctgtggtggaagacaagaactgactcctgactggtgtcctctcctttccacaggagtacggtggagccccccaataatgataataaataaagttagatgttcaagcttacttttcacacgtatatttcaggaactcagaagccgtgaacatctgcttagttctaagcaagcaagtgggagaccttctaagtaagcgctgtggatgcaggacatcttgatgctgccactttgatgtggctgttttgactcagggtttccgggacatttttgacacagcctaaaaagcaaatgattaagcaagctgcaattttgtatagcaaaagaaatgtgtgcaacaggcacgcaaacccttctggggttgggtgcagatgtgagcctaatgtctctgtgtttccactttaccatgactgttttgatgtctaacactttcatgacatcatgtgggacttgccagaatgtttgctgtcaatacttgctagactcaatttaatggcaagagtagacaggattctgatgtcaatggcagcagggtacaaatgaaactgaaggcaagagggatgatgatctgggtgggagagaggggaggaggtgccagagtttggggaggggctggctaagaaagtatgctcactgtttcagcacatggactgcctctgttcctcatgggccattttctagttttgagcttaattttactgcacagttctgtctggagaattgtttaaagatggaaaaagatcccagtgcaaaactagaaatgggatctgtctgtgctctagagatggttctggtcattgcctcctgcttgctgcacggaacactttgtgtgtgtttcatttggcagtgaaggaggtggcccgggctgctcgctgatccctgtgaacatgcagccacactgctttctttttataggtggtctgagagatcctcagtacccgcctgtggcttgaagtcagaggttgtctgcaacggcaatttagtaaggagaacataggggacactaagagcttttaagttttgactacttactttcaccttagtttcctggcagaccatgaagtactagtcctaagttttagggaattttgatagtaaacacattaaaacagcttgctatgaataagtaagccattgtgtttaggtccagaaatttagctctgagttaaattctcaatgtcttgttggaatgctggggccactagataggtcctttaacttattgtcatctctgcaaggaccttgataagcctgtcctcttcttcctgttctctagagaaagatactgcctgtggcaggcaccacaccactgtatttttttgagcattttgtctacgtgtatatgtgtgttgtgcaggcagatgggtgcacatgtgtgtgtgcagctgtgtgtgtacatgtctgcatgtgcacgtggaggtgaaaggtcattcttcaagtgccatcaaactttcttttcggaagcaaggcctttcatttagtctctcactagtagactaggctagccaacaagccccagggatctacgtgtctgtgcctccccattgctggcattataaatgtctgtcaccacaaccagatttgtgatgtaatttctaagaaccttgctcatggctccctgctggcagggcaagcatcttccttattgagccatttttcgtctccacctttactaaattttcatgaaggagtagcagacccttcccttccccatattataatctggggattataatataatctggctcctccaagatgagatgtctttagagccctgttctatgactctggcttccagttaaaaaggaagacacacattaaacactgtgtcacacagctagcaagcaaagagtgaggacttagatgcttgaagcccacactcctcccattatcattagtgatgctgccaggccattgctttgcaggaagatgttacttctgtgaaggtttgtctagtctggtcagaatacctgagcaagtgtgccaccctccttccttggaaggcactgtcatgctatctatcaatgacgtgtccctccaggtgttgctgtcttcccatctgtttttgttttttttcatccatcaaatgattatattggtaaataaatactaccaaaatatcctcattttatcaaagtgaagatgtataagcttcgttctaaaaaccttactggcctggaggtgatatggtgggggaggggaaaacacggtcctctcttccccaacaggggttctactgggcagactcccaagacagcttgcatttatttgggacctgtcatctggaaaatggctgggtgacattcaaacatgatagtgatccaaaggctgcctgcagccacactcctttgattgagtggcttttacctgtgggcagtttaccagagttctggttatacaagtgacattttaaaaccacaattgactgacctttcttttagctgtatacagtggctttttcagaacagagggaaagtttgagttaccagcagatgtgagtgactttcacctgtgtgggatgtggaagatttgaacttgggggcatcctaattttggtgcaattcaggccatgactttcctgaaaaatattacacaccccagccccttgttattaagagaatgaaagagcgcaaaattcggaacttgatatatctagatttgaaaccttaatgtcctgttgattttaaagcctaccccagtaaaatggaatagagacagttttctttcagagtcagcaagggaatgactcctgggaagcccgactatttttagtggtgctctttttcttaccgtgggaatcaagggtaatgggggtaaatgtatgcatctgccctatggtcaactgaaatgcagtgtgacctcagcattccactttcatcttcctactttgcttaaaggagaccccgattatctcagctcagggagtcgctaaccaggagcttcatttctgttgcagtgccaacaatatgcccaagcaggtagaagtgcgcatgcatgacagccacctcagctccgatgagccaaagcaccgaaacctgggcatgcgcatgtgcgacaagctggggaaaaatctcctgctctcactgactgtgtttggtaagtgcccgaggtctctatactcccttctccaagatcacgccacctttttttccattgctctcttgatttgtatgggagctagcctctcagagtggacttcctgaagaaaggaagacaggtgactgcctcaatggcaaaaatctacccctaaaccaactctagccatctcttctcctctgcagtctgtgagttccctctaatgtccatagacagttgctgtgagggtgaacatgcagcttcccagccatacttgtgaagactgtgttgagctgttgggagacaggccagggaatccgcaatgcagccaaccttctgaacgaccccagaagcaggcaatcagtatacctcattcggagatatccttgcatcaagataaggacaacagggccagaaaaccccactaagaagattaggcctttgccagaagcatcgttaacgttgattgattgatcgagttgtggaggggaccatggaagaggcccactctgatgctcagatatgttccaagtcatcttggaggagtgccccctgcttcaagccactctggggatgtttcctttgtctgagctgtcattgcagtcttggtgttgggttttctatggggtgtattgagagcagaggaaatggcagtttcttgtaatgacagctgcacagtttctcttcccaattctctccttgttcttcagctctcacttagactacacagagaaacagctaaagttcatctccgtcccccaccccaccccacacacctcctcaccatcatcggcacactctcaatctcccccataccctggaccacctgtagcatctcagctgccagtggaccacaatcaaaactgaggattgcctcagttcacttagaaactgggaaccacagccatggctgggtttttaagaatcatacactatgtaatcaaatctcatccaccctaggacttcaagaagattgacagtagaggtgggaaaaggatctgcccttcagctgcagccttctcttcatgtccctaaaattaactccataacccacatgcctagcacctcctacccccatttccagggggtctataacctagaatgtaggttatacttttgggggttatgttggccagccattttcaacagtctaaagttgttctggtggaatgtaggagtctgtaaagcaaacagcatccctgccagtgtctttgcttgacttgactcttctcagatgatatagagccttagagccctgtcctatatgtctgccttccacttaaaaaggaaagcatacaacataccaaataccagatcccattggcagatctggctgagagaaaacaaaaaacaaaacacaaaacaaaaatgatactgcctcctgggaattggttcttctgagaatttgtgatgctatgtgcaatcaatacctcgaaagattttggagtcaagtcttcgtttttcccatgaagtgttaaaaaatgttcttctggactcctctggtattagagtaattggagctgttacagaaaggtgtcttgctggttgtcaaaaatcaatgtcccttatgtaaggtcttcattttgaggtatttgtagtccattagccagacacatgaaaaagatcacaaccactggaaggaatctttagagctgtttgtttcactagggaaaaaaaaaaccctgaattcaggttgcctctttcccttcaacaggtgtcatcctgggagcagtgtgtggcgggctgcttcgcttggcatcgcccatccaccctgatgtggtcatgttgatagccttcccgggggacatactcatgaggatgctgaagatgctcatcctccctcttatcatctccagtttaatcacaggtgagagctccttcccagtgcctgcccacctatggcgaagcccagtgctggcttccggggatcaaagtagactttctttatggctgagtcagtggactccactctatatcattgcatctctgatggctttcctgtctctgaaataggaatcattgatcctaaaaagaaagacaatagatctgtcactcactttacctttccttctaacagtcaaggattcaaaggaacagccatgtattgaaagtgatactatcttgctatttcatttttaatattctcagcatattggaagatgatagagattgtaaatgaaaaaatacactgcttttattatttacttgggcatttaggaagatatgaattgaaaagagattaaatgctagacatgaaagctgaaggtgttttaatagaaagatatacttaatatgtgataacattctttcttatattttttggctaaaataattcattgatttgattttttttcctatgtttgaactcatgctgataatttttttcatataagacaatgttattggaacagggcatgatgtattgcttagtgtccagtttggagttgatagtggggggctccaagctggtcatagctagttgccaatgagtttggtggccttcagagctatcctctgcactgatagacttggaggttcagtgactccagctgactcccacactgggccaattgtcccatccttacaccagaaacactagctttcaggtttaagtgttcaggaacctgaatttcttatcattaagctttggggttgaatggatccgtgcttctctccagaccagagaagatgttttcaggcctattcaatatattatatgcaagccagcctggtagaaagacccggcttcctttgcccagatttagcctttgggttctagagagaaattggtcatacatgggtcacattaattcagagaaatccacaccaacatcctccctagcatgaaaaaaaggacagatccccagaaatgggttctatctctccatttagtaaaggtaggaactgaaaccaggaagtaggcacactgaagaaacagctggagaaaaagccccagcggaggctgaggtctgtatgacttgacttggagtttcctctgactgccctcagtacagatgctgcacatagtgctggcagctgcttctcatatgtgctctccaatagccacatgaggttagacatgagaaccaccatgcttcaacacaggggtgtgggaggatcatgctgggtctccatttcagtctcttgtagtatattctaaagacatttgaccatgaccttgatgtcccagcttttgattctcctaaatgaggacaatgaatagtaataataacatatgatcgaaatgctatccttggcttaaccattgcttcagagaagaccattgaaggtcatgaaaatggaaaagacatcattatcttagacttaaaaatggaaaactcttcaatattattttcacatatatactagtgattgacatttaggttgaaatcagcgatatgtaaactatgagtcaccgactccccaggttctcaagaatctcaaaaataaccccagaaaatagaaatgtaaagtgtggaatttggtcacatatttagtcagaggagtgctagttaaccactaatagatctgaatgataggaagccaggggggttgtagatgtgtagagatggggacatgaatagaaaagaacagaactgatctttgtggatttcttttaaacccagggttgtcaggcctggatgctaaagccagcggccgcctaggcacgagagctatggtgtattacatgtccacgaccatcattgccgccgtgctgggggtcatcctggtgttggccatccacccaggcaatcccaaactcaagaagcagctagggcccgggaagaagaacgacgaggtgtctagcctggatgccttcctggatctcattagaaatctcttcccggagaacctggtgcaagcctgtttccagcaggtaacccaaatccccggggttatccctgtccaatctctcacctcatccgtgatgattcagagaccgtttcaactctgatagcagttttctaaacgtgctctgatctctgtcaggcttgagtgtttcgtgatatgctctggagtattctaaggctagaatcagatcacctcatttctggaatatttgttgcctataaccttaatatcattctgagattcaccttttcctttcttctttttgctcctgtctctcagttgcacacagacactcttttaccggtcttgttcacaaccctctaaattgcccagtgcttctcaacactattctaaagctctgtgtcgccctgaaaggaaaaagtgcctgacgtaatctgtcctacaaattgagaatctgtaactcatcctcaagataagacaggggagtgagtgtaattttttagttgtgaaaacatcacacatctatgatcctagcagtgggaaggcagacaggagaattcctggaacagtgaagctaagtctacaagttctaaattcactgggagatgctgtccaaaacataataaggagaaagaccaaggcagatgctgatatcagccattgattggccttcacatacacttgcacacacatgcaagcacaaccccacaagcttataaccttaaaaaaaaaaccatataatcctgctaaattaaactacctaattactagcccaaaacacactcactgttcggttttctgactacagagccaggtaagattgtcacacacctcagatcccattagctcatgaaaagactaaactggagcctaaactggaacgaagagttcttcagtcattctcaggcaagcactgaagaatgaagttataagacagacagcttagaagaaaaatctgatttcccacccttaaaatgcagtgccaaataccactgagcccacattatatcaagctgggatggggtttttttttctaatttttaaaagaaattgtgaatatataaaatgagaaatttgctcatcatcttgatttttttgatcagtgacagtatgtttggaaatatcccatatgtatgtattcacgtatggaaacatcccactattatatactataaatacgtataattaagtcaatgaggacttaggttaaagaaccccattccagactggaagagtaggaggaggagtgactagaagctagagaaaggaatcttactgaggtcccctgttcatgtgcttgctagcctcgcctcggaggatggtgtttcttgctttggagtggtagatacaagtagctgcttttgaattttgaaatttttgaaatgtgtgctttggagctatggatcctaggaaatttgctaagagaaaagaggtggggaggcacgagagctcccaggaaggacagctatggatcttcttcctgcaccatcacatctgctcagattctttcatttcagcctggggaataaggccagaaagccccaggcactcggagccattgctctgctgttgttggatggagcttctataatgctagccatattcacacttgggtggtcccgaggctgatggtgggctttgccccatggcaaagcatactgtctggactctaggggatagaaaactacatcaggatgtgctccgtccctgccaggatcttataccttcctatggcaacctagttttgtttcctcagctagggctagggtcaagagctctttgagttggggcagcttgaggaatagcagtgtactgtcctttacctgacattgtgaatgcaagtagatatttaccctgactttaagggccttgaccagagaagaccattcttacagagtaacaaaacagagatagagaactgggtcacttagcatcctttctggatccccatggcctggcgaggagtgtttttaaatgacctatcttgagtgaagggagattcctgactagagttagaaaccggggcaaaaagaggaaggataattgttcccattagaggcagtcttccgtggtcttggcttgctcaagttagaccctccatgtttaaaaccaaaacagcctcccatctggttttaggaagacagagctcagctcaagtagtcactagtcaggtcaaattcaggtccttattctaagaaagcttgagttagggaaataattggttttctattgaaaaacaaccagtgtgacagctattgatgtaaacaaagctacaagtagctgatggcaggaggctggtaagaaggaaggcatgtaagtcaactaggagatacttgtgagttttctggcaagttgggctcaggtgccacagcaggtatgcagatggagtggtccaaacccaacgtgtttgtattcatgtatggaaatatgaactgagacctggacaactgaaacaccccttcagttgggaagctagattttgaagtctagcatgattcatgttgtgtctggcttcatcgacttactagaaatcaggtcttgggttatttgtaggacatgaaagatgtgagacccttagcaaccagcctcctaccagaccctgcttgttatccatgatgatcactatagagtagtctacactttggcttcttcatccctctcaagataagtctccatctttgttgcctagagtctggcagctacatccagaagtttcccttctggtcacttctgtggtttctcttcatgtttctattgcccagagcttggatcattctctgcttatgtagccaagtttgggtctcctctgaccctgctcaagtgtatacagccaggctaacacgggaggcacctgcctcctcctagagaagtttgcctgtccttcttttctgttcttgttatctcagtccagcattgctaactgtcaaactcagccacagaaggatcaagtctgtataacttaacatatggtgcagggggtggaaagaattcaatggtggtcgggccatttaagttcaagtgtcagttctgccaataactatgacgtctgaaaagccagttcttcctgcatcgtcttctgtatctattcagggttcagccatctgtcacctctcacgtgccagcacagacattctaggattttgaatgatttctattttaatgccctggaaagtggtaaattttgaggttgagatgtgaatttttacatgcaggatgcctgacacctttaaaattagacccacttccacgaatgtcgaggaatagcataggagatacttggggagtattaggcaagagtgagttggcttcatagcctgaagtatatatttcccaccttgcatatgaattatatagtcccagaaaggtggctattgggtagctgtcaccctgctgtccagatggagattcccagcagagcctggtattggaaggacccagaacctaggacaggcttctgatgattctgtccagcagaaagaacatttacctgggcctcacagtttgcaagagcagctactaagttggacttgtgataccatcccccaatcacagaggtgtcatcatggggaggaaaaaatggacacatatcccccagctatagcaactgtgctgcttagggtacttaggggacaaatgaatatcataaactttgtaataatcttgttagtaggatagctgcaccatactgcatatgctacacttgatcttagccaaaaggccgagaagcaacaacatactgcatatgcaatgagttaatgctctattaagaatataatcataaaatattccccagttttattagccttgttttggcatttcatagttgtagttaacatcttgggaaggttcaagtgtatgactggctggctgggttgttgttgaccttttagactgaccttcacctttattctttttccttcctgctccattagattcagacagtgacaaagaaagttctggtggcacctccatctgaggaggccaataccaccaaggcggtcatctccatgttgaatgaaaccatgaacgaggcccctgaagaaactaagatcgttatcaagaagggcctggagttcaaggacgggatgaacgtcttaggtaggcatagtggttgttgccatccatcacctttgacttctggacagtggcccgcctttctcaacagccttcttccctcagttctcagtatcccaacgtttcttctcaaaaaacccagtaaagtgtcctctaggtggcgcagaaggttctctctggggaacaatatgagtgtcactgagacagggctgagccatgaaggaagacaggaagatcagcagaaggaggaaccccaaagggacatggcagccagagatcaggggtagaaaaagagaaaagagctgacatttgtcaggcacattatttaactagccatttaatgaactgggctatgcttctcttttatttattaagttttgttttagctgtctctttgcagaagcaccatgcttgttgttgcatcctagcttcaagtctataacaaaggcagagttgccagtattggacagtgttagattaggaaacaaagggctattacagaatgtatatgacctgtctccttgagcctgatgccttctctccattccgtccagagttcctctttagctgcacagatgtgggtttaggaggcactcattggttgtctgctcctgggcaagtctttctacttctctagcctccacagtaaattggaaatgggattggcccagggtttgtgaaccgaccgttgtaaaaatgaaccggagctgtgcctataaagcaccctagcacatgcagtgagctctgctcagacaagctctggtcattatgaaaagtagatggagagccaagaagctcaaccagaacacattccatgaagtgcagggggtgaggtggtttccttcacaggatcagctccaaatttgcccagacttactgatcacccagccaccttagggctttagggtgggcccattctctcccatttccatcattgttcagtttaatggtgttaggaaaatgggtcgtttgcctgcaaaatggaaaaaaaaagagaaataagaatctgtaagcaagatcttgcaaagaagtttctaaggactcgggtgagaactgtttagagatgggtcagctcagtggtcctgtccctttgtcatctaagagatcaaatgtgcttgtctccttggattgtcattagataaacttgaatttttagatcaatacaaataacaataatttagtctaagtatgtcccacgtgctagtctaaaaataaataaataataataatattttttaaaaaaggttcctatgtaggatgtgatcagcagcgctgtgtgattgctttgtgcactgtggttgttttccgaggacatcagtgctgaacagagaaggcggcagaggagctgggcaacccagtgcctgcagggctgaagtagatgctctttgtcctggaagaaagcccgttgggtgagagggagggaggagataagctgagtgggttgccaggcaacaaaggatcagtaaacacagttgataatcagtaacaagccagaggtagttgggggggaggaggaagtgagagagtcccgctgagaaggaggcatttctgataacccagaagccgctttctccactgcaaagatatctacaatcctttcagggccttctcaattcccgggaggcccttctggtgggtcataactttagatcccatcctccttgacaaagtaacccctgatactttggactgaataattcagaggactagtctttccagagtcttaatggattctagaaagtcacatgacctgtggctgtgcctgggagtttcaaaatactggcaaccccaaccaagtctaagagggctttgttcaagtgaagtacccctgttccagtgagcagtttcaattaggcaatgtttacccagggcaatggcaggctgaatcccgcatccattcaagtacacagcgaggcactgcgaagccaagggaagtcagattgttgagaaacttcccttttgccaatcccagctgaaataaggttcttttcatggccttggaagggcagcagcagtggctctggttttttgttttatttttctgtatttctggtcttcggtttttggaaagccccaaggactgagaactgcaatacaggaaggtgcaatcttggctcagccttctgcttctccaaggacgtgctctgctcctaagaaacctggagagctagcttgtggtacagcatacctatgattccagccctcagaaaactgagacaggaggatgattaatcaaagaccaatttgagctataagtcaagactgccctcaaaaaccagccaaatagatgaacccccaaaccaattcttgatccccaccttaactccaatagcttaaattggtgccaactactctctatatatatataaaatttaataaatattatgatttgattcccttagacacaaattccttctctctgaacctctgactttatttcccctttggtaaatatatatatatatatgtatatatatatatactcatagatacaccagtgtctgttgtttccaaggagagtctttattctaattctttgggactctaagacattgtgctttattcaatagcaccaactaagtaattcttgggcttctcagtctttggttctcactccccaaagccacccttcttttctacatcaagcattaatcaacctacttaactagtagtcctcacagatggattcggtgtcaccacgcccaacaaactgccctccacggtctcagagaagggtggaggaagagctgagaccagattttctctggtactgtaacactggttcattctgccctgtaccctgtctccactaagtcccattcttttctgggggtggggggcaatcactcaattgtgatgtcacttatcaatccctcttgtcaagagctgaagaggggaggtgttaaatggcaaacattagcaatctgagtacaagggatgtattattttcactaaagagagatgggatcccaccaagtgtagttaagtaggttgatgaatgcttgatgtagaaaagaagggtggctttggggagtgagacccaaaggactaaataaagtcagaggttcagagagaaggaatatatgtctaagagaatcaaattccaatgctgtaatttatctgataaaagacaaaaaccctggatagagtaaggaaagactggaaagtagccctactaaatggagtagggtagggtagggaagagtatggagagagagagagagagagagagagagagagagagagagacagagacagagacagagacagagacagagacagagacagagacagagacagacagagagacagagaaattagaagatgcccaatacttcaggatcagagaacaagctaaatggacaagcaatgccctgtagctggaagaataactgtgacttatactccagtatgtagtcaaagtcaggtcaccaagatggcgggggggggggggtccaggaacacacatgattataactgaaagtctagacagttcccagggagtattgagaatactgttagccacatagtgtaccccagtcctgatgtgttagcatgaggtactgaggttggaggtggttgagagtgaatcttctggaaagagaaacgaggcttgaggatctaaagtccaagggcagatcaccaggtccttagccacaggtgagaagtcttgagtattagatttgcctcaggatgtggtcaaaagaagctgccactgagagagagggtagggagtgaacgcctcagatccttcctgccttggattaggattggcactggcggctgatgtgcagttgaagtaggatgtcaagaaaagagagaagatgggtgacagggcaggtattggcaaaaatctaacaatgaacccaacattctggctttatcatcctgaaaagggttaataaacggaaggaagcataataagttgacttctgaaagggcagttaactggggcttcctagttaactaggatttcttctaagttccggttctgtcactcttcttcctccctcatttgctttgtagctggagggaattccccaggtgaggtatacctcagaatagtacctaaaaggtctagaaatttctccagcaagggctagttgtttctgttcttccaatcatggttccaaagtttgcatgacaatccccaagtcccgacagccccttccttttaatctgtgtggtaataggagctgtgcacacatgatttgccaaagtgaggaggaagagaagatagcaccttgcatttgggaatgaaaatgaattcattttcttcaaggaaatcacacctcaactacttagagtttagtttgttcaagtgaaaaatgtcaaaagaagcaataattatagaatggaggcggggcaggtgttcagtgtgaaatgtaatgctttttttcccttctaattcctaatttatccaagggtgactgacatgtagaattggccctgtacatcaatcatgctaaagtgtgaggggaaaggaagccaatattttatcatttgtccttctgagtaatgttaattgcccataggtctgatcggattctttattgctttcggcattgccatggggaagatgggtgaacaggccaagctgatggtggagttcttcaacattctgaatgagatcgtgatgaagttagtgatcatgatcatgtggtaagtctgtccattcatcctgacttcattgtaatggcgctgtggtacgggagaaagccttggagtccccagagaacagtggagccctcccagtatgaagaatgggtacagaccaaaaagatatggagaaaggggtgtaaaactcttctcccttctcccttccctcttctgcttccctttcatcccacaatagtgctcattgggccaaatctgacatatcacctaatcctgtgtatccttcggcttgaaaatggattttagtgtctcacacatccatcccagccgaagctggtgaaacaaagtgctgagtgctaaatgacttgcacaccccagatatttctcccagttcaggagactgcaagtctaagatcaaggtgtctgtataatcaatgcatagcacattcatctatctgagttctgagagaaacaactcagagtaggaaaaggagggaaacaacctcctgggttctcttctagagcattagtatagtctatgtccattaccatatcaaaatactacaagctaggtaaaattataaataaagaaattattattatttttttaaactataggttgggaggctgggaagtcattagcagatttactatctggtgaggggatggtccttgtagattactctttctgtgtgctcccccacacagaaagagtaatctacaaggtggatagaaccaacaggcttcagtaaggctctcctattgaaacgctaatcacattgaggagggctcactgccaagtagcccatcttccaagtcactggactgaggctatgactcttccaaaggaatctgaggggacaaaaccattcaaacttagtagacaccagtctcattcatcagggtgttatctaatcacctccaaagcccccactgctgcacatccagtagtagaatataaacatttaaataagggaagggacatactttcagttcatcgaaatggcgaaggaaagaaaaggaaatgaagaaaaagaaaaccaacagattaataacatcccatagtacaaaaattaaaagttcacattatctccaccaaactgaatgtggcgatgcatttgtggttgattctcatcaaaacttcaggaatgagaagctgactgggggctttgatgcacaataagataactgaaatattagtgctggcatgttcaccacctcattgaacttttaaaataagaagggagaaagggatgctggtaaaaaaaaaatgctgcattctctgcttttatggttctggaatctcagttcctgagcagtgctaatatttaaatgtttcttttgtgtgcagacctcagctagcgtgggaatgccatgtcctttaggtccatctgagtctctggggacctgaggacctggtagacagtgacatacaatgcagcaccagcttcttgcttgaccagtacttcatgcccatgttgcctagagtctccagcagcctgcacatcccctctgcagtaaatatgcagttcctctttctaaaggtttagcaccttgtgcccccatcggtggggtgggtaaagagggctgtgagtcagacctgaagaaggaatcttcacagatttctactacctcatctaggaaggcagatggggcttttatgactgaggcccatttttttatgaggcccattcccattgttcttcagatgtctccccagcatcaccactggataactccaagcccgtggaaaggacctgggtaaaatcactaagcactcttagctgacccctggaggctaaaatcgccatagtctttgtgtagtggtaagaggggtaaaaatagcaaaccctagcattgtgaagataaggcagtctgtattattagtttcattttttaaaaattgttttgagataggctctcatgtcgtctgagctaggatagccaagaatgacctagtggaccgtctctctgagcactggtatgcaactccatgtctggactaaaaattatggtcactaaaatgcaaattagaaagatttcatcttgccacgtgttcaacttcaattactatattattgaactatctcatctattaaagaaatcataatacttaactaatttttttcagtatgcttagtattaacctggtagctttccatgtttgcatttatgcattccaataatacctggcaaactagatgctttcagcatcccattttccagataataacactgagtacaaaggttaagttgcccagtgctgcagagctgcattgtccagcagtcgctaactcagtttcttcctgagtttgaagtagataaaatctaggaagatctggtgacaagctatgtgatcttacacatgctagacacatttgaaccccagtattctgattagtaaaacaaaataactgtaaaacccatgtcatggagttgctcagagaattaggtgagatgggaacccagtcactaaacctgttctgtgtccacagagggaccacagcacttctgtaagtgggcctgtggttattccattgcgatcattatcaccatcaacacgatccatatccccagcagctctgtgcatggtagttctttaagaagtctgaaaaaacccataattttgttgtaagtttcatatcctcattttttgaaaattccttaaaactgtttttttttcaaactgtgaaaaacttaaaacttcccacagtcttcctctatcaggaaaagaagtctctgcccttcctttgtttctacccttgactactgcctctccaccatccatactgtttaaggaaagaacattcaatgatgcttgcaaggaagaaatgctttctgcagggctgtctccaagtgtataaggaccatagcaacgtgactttacagtgatggagagggactaggctcagacccagatgtcctgggaaggtaggaatttataaccaacggagtgggggagtatccagagtcagaggactctgttgagaccctatcagaattcttgttgaagtcaggccagggaagccagataccacttggggatggtcaactatgaggaacatgatctgaaatgaagagccacacacggaaggtggggattcttgctaagctgactcagtggggttctctgctgaactagtatttcttaaaaaaggaggcaaacagatcctacagaaggaaggatctaactgaagtttcataaaagcaaagaacttttcccccaacccatttgctctttcactcagtaaataatcccttctaaatggactatgatgtgctataatgatgaataccacagaggatttctgcctacatgggcctcccattctagtggaagaagggacaggaagtcagactaaaggaaccaaatatgaattcagctagtaatgcaaacaacaaaagtagggctgtggggtagagagtaagggaagtagacccaagtgaccaggatgggctgtgtgggaatgagacatggtaaagaccctgcagaaagggagaagtccgaggaaaggaagcaggaagtgaaaggctattgagggtcacaacaaagatctggagccagtacagtgaggaaggttaaaaatggtggaaggagtgggggtggaaaggcaggtgggggtcagagcccccagggctctctgggtccctgagggattagatttcattgaattgtggtaggaatcctctgagggggcagcagacctggaggctgtgtgaagtgcttgtcacttctccctattcgttgtaattctcaacagtagctgaaataacagttgcatttctagagcttggacagtgagagtggctctagaaacatgtgagaccaagccagtgtgactacaggacagccctgtgagaaggtctctgcttagctacacttcacacatctgtctaaccatctgtaccaagcctgaaagcgccaagttagagccttgggatttcattggtctgacataaatgagagccgaggggaatggtttccaaagactaaccaaggaatatctgcatttcatcacttgcaaatgagaattttgctcatgaaatatcaactctctgttgaatcagaattatctgggggaatgcatttaaaacatagaagtcctagtactagtctttggtggaagaccagggcacacaccctgatatcaggcagttgagggcatggtgatgcagatgggtatgggtaccaggaccttgactgggttctggatagcttaaatgctgtgggtgaggttgtatgcgtgaagtggaaagcatccctgcaaaggtcaccttggtggaacccttccacaaaggagggccaagattcacagagggtggaggctggaatgacacatgcactgtatgtgaatagtggccttgtaaacagggcccaaagcagagaatacagcccacctgtgggtaacatggagatattccctacttctatcccaatgaagatgtctttctgaattggaaagggacccaataattattgaatgtcatgtggttttagaactcttggctggagccttaagcctctatctctactaacctgtggtcttttttttgtttcatctcaaaagttttgagtggtaactttgactttgggcattttccccattcttttccatagagtctcatctccagtgagctcatttattggtacagaagcccaggaatagagctcaagtcaggtgtagggaagtaatggcccaaagtcaaagggcaaaggctcttttatgccccattaacactcatcctattagggatggaccgtacattattatttaattttattttagatgtttgagtgctactaggagtagcattccatattccctagctcttatgcctcaccttgtggccttggctaatactatctacagtgggagctgatgcccacccccactgcccaaaccctgctcactgggtgctccctaaggtaggcccttgctgttgccttagtccatctggctctggctccaatgtgctccccctgggggactttagagctgatcttccttggcaaagtaccttgaaaacatgttttgttcattctataaatttacctgacttggaaagaggaggaggggaaatgaaagaaaattgaatagcatcctaaacagctcataactgtttctgcagacagcctggaaggctgactggtgctggggaaagaattgatctcttggtttatgaagatgagtccttcagggctttataggaaggtgcattctcttcagttattttacagttcaaagacaaagtgctggcctctggaactccatagctgatttatgagatgttgtgactatgggcataccagaagaatatcaaacagccagaaggagggtttgatgtcatgacagaaagcttgtttcacagtcttattaatgtctagagaagcagttttcaagcctggccagcttgcaccccaggagagagacaagcaagggtcaggctggaaggtccacaagaaagagcagagccacactaaagttctgctttgtcgctgtcagtcacgagtcagctctttctgaagggggtttgctcacaaagccatctgccattgggtagccagtgagaggttttagagagtctcactaactcaggcttggataagaaagcatggaccaggagaggacttgagcccaggtacgtgcaaacagacactcctgaagagtaaggactacagctgagaaggatgggagggagactcagcagggtacacagatgcatatgcaaaaggttgagccttgcagttgcctggtgatgttggactcagcttctttcagccttgatgcacatctgaaaaacgaaaatatgttaccaaatgaggtcccatagccagggaaaggctgggcaaagtctgtcttttctgcatttataaggactcttgtctgttctctgtagcctttgtttaacttgggaaaggcctggtgctaggggctgattgccaaaagaaagaagggaaggaaggaaagaaggaaggaaggggaggaggaagggagggagggagggatgggaaatgaagggagaaggaaggagggagggaggaagaaacaaagagagaaagggtctgcttagatggacctttctttcctaaccccactgttgggggccatgtctggggactttatttcctccttagttattctcaaaaatacatctataattgttaatgaggtgttagtcttcctacaaatatcttatttcagtcagaaaccataacagtgtgagtaaattcatgcttagcaacacctccactagctgcagctgctgatggtgatggtggtggtggtggtggtggtggtggtggtggtggtgatataattataataaagaatgaccccagtacaaggaaaaataaagttgggatgagagagttttcccaccagtgggaacaggacagtttccaagcccctctataagataacaccagcatacaaatgtcagtattggataacctgctgtatggtgattgtctgcttgcgataaagggaagaagtttggcttgggaaggaaaacccccaactttcgggctttcacaaaatgccatggttctccttctggctccgtgggcttgggctagtgactgaactttaccaagtgatggcttccttaattactgagtaataaccctgatgttcagcttgaaggactacaggaaggctaagtgaggctctgagtgcctggaatacaatgaacaggagccagtgttcctgctgttacggcaggagaaagactcaggttcacaaaaccacatttctctaaatgtactcccgggcacagatgctttaatgctggcagccacctctctcttattccttccctctcttttacccgatccctccatcattttaaatacactcctcaacctccaggattaaaaacaatgaacatttacaagtctcagttatttcccaaattctaggaaggagttaaagaacaagggcatcaaaccagattccagaaacacaatctgtatctcttggcctttaactcagtgtttgcagaaagataaactaaaggatgtcaaggcatgccccctttattcctaaaactcaccttagcaataaagtttgcctttggacttaatcgccagaacatgcgtcagtagatccataaaacagttaaagtcggtcaattcaaagtattggatcttgtgttctttctcagcaaaacagagtgtgtgtgtgtgtgtgtgtgtgtgtgtgtgtgtgtgtgtgtgtgtgtgtgtgtgtatagaaataaatgaataaataaaaagaggaagggttttctccaggtgcaggttcccaggtagggtttaggtccctaacctcttaaggatatcttcaaagctcctgttgtctttgtgtttttcaggtactcccctctgggtatcgcctgcttgatttgtgggaagatcatcgccatcaaggacttagaagtggttgctaggcagctggggatgtacatgatcaccgtgatcgtgggcctcatcattcacgggggcatctttctccccttgatttactttgtagtgaccagaaaaaatccattctccttttttgctggcatattccaagcctggatcactgctctgggaactgcttccaggtagaggacaggagaaaatacctttctccacgtttggtgctttttgttccatttgctgcttcctgtttctctcccaaatctctaaatttacaccttttcacaacatatgggaatattttctacaaggtgaacatgttggacctttggcttctcctgcacactgctgaagctcctggttagcttgtgggtggtctgctatcggcctagaaacacaacctcatattaagtgtttagatgttgcatgctatgaattcacatgtccaacattacacgttacatgaagcactaaggtagcataggcataaatattatccagaggatgtagcatgatgttgttcacttaacaactcacctacgatttagaattctttttttcttttcttaaagaaaaaaccttttgaggttttagctaataatttttcaaaagtaagacaacttatgttttaaaagatatgtctatttttgtattgtgtgtgagagggagtgactgcacatgtatgggctctgtgtgcatggctggtgtccccaaaaagccagaagagggagttataagcaagtgtgtactgtgtgatctgggtgctgagaactgaacccacgtcttccgtgtagctgctgagttctcatcaacgccaggagaaccaactttcatggggtaaatggtgattccccaccccaccccaacaattagaaaccggccaattctttgacgttaacaaaccccattaagaacaattctactctaatcctgcccatcctgcccgcctcagatccagtttaaatgacttgaccctgatagacccttcctgcttctttatatattttcagggcctagggaatcaataaggtcctcaaatataggaatcaaaaataatctttaatataatcttgggcaaatattcggcaaaacacaacaaaacggagggaaaagtgcatctggaatcttagaatttcaaagactgaggagttttacccttgcagactgaagtcggtgttttacttctgaatatgtgtcttagtgtcatgaaactgagctgtgagcataaaacactaggcaactcagagcccagcaaatgctgaaacccacagtgggagagcaccaggttcagctgctgagcctgcgactgcttcctgctggtgacatctccactcagtggcacagcatgactggaccttccaaggccctgtgcaggctgtcagagtcttctcagtgatctgaaagccaagtgggaagccaaattgtatttgcatattgcaagcgagtaagaattcaatatgactagaatgtgagctttgggcaaaaggctgaaatgtgttcagtgctggcgaccagatttagtatcctgtttccagaggttaggggaaacacttcaaaatttccctcttacttcctgatgttttaaattctctgtagataaatgcccatatccttgaaaatgcttttctgaagagaagcagttaaccatccccctacaaataaaagccaaacttattttgttatctgatcgtaaatgtgctatgtcacaatagtgacaaggttcagacaatgaatgaaattttgaggaagaccgtgaacctcaccagatgagtatttctctggctaatatcagtaggccttgtagttaatcttcatatttataaatcttccatttcttactgtgctactctagaaacttctatttgttttcctggctcaagagaccatgaaaatcatatccattaatacagatctttgctactactttgtgaacttcattataatatacaggacatgaaagtctggagaaatggcttagcagttaagagcacttgctgctcttgcaaaggacttgagttcggttcccagtacttgaatggcagctcacaaccacctgtacctccaacccacgaagatccaacaccctcttttggcttccatgggtatcaggcatacacatacatacatgtagaccaaacattcaaacatgtaaataaaatgaaataataattatgctgtacatgcccagaggtgtaaatctaaaacatgttggttaaacaggactctcacaaatatctctgccagggtctctgatgatcacctcaggatgcattctagacctggactttctgagtcaagaagtgctcactggctcttttgacgtgcactgccgattaacacttcagcaagtccagaatgtaattttcccaccaactgtgtttgagtgtccttccccatccactcaccagagctgggtattccacatctgtgttgctttgatgcattccaatcttattggtgggaaaactactcagcaaatttgcatgtatttgattacagatgggggaaaacatctttttatttcttactgccttttcctccccattccttgcctcttgagtcatgtgtgagctagctcgattttctttgtgggtactcatcctttcctgggtggttttcaagctcacattatgcatatgaattattaactcttacatcacatgctacagataagaaacctccctcctagacatctgccttggaaataaatactaacttttggcactgaaagtattttatttgtattatattaaaagctgtgaatactttttttttaaatttagaaactcagttctgctcaaatattttttctatccacaattataacataatgctttcatgaatttgtccttaaattatttcaaaaattattattgtttttcttttgaatagccagttatcctggtaattttaaaagacaagacaacttcctctctactcttcctgtggagagaaagagagaaaacatgaacaagtctttccacagcagtgggagctcatgatctttgcttctcatggtgacaatcaaggagcagaggtgggactagaaacagagtcaaggcttaagagccccaaggatggccaaatagccggtatccacttaaactttacatcacaaaggttccaaacagggccgtcataacaatagcaacactgagggtgactgactggctctttgatgaatatggagacaggcatcagagaggagtgtgttccaaatttctggcttcagagcatgctggggggtgtatcatgtcataggaagaatctcaatattggacattattattagcaacatcattgggcctctcagatgggagccaaaaagcaatgccagagtgtcatcctgtcagcacaggaaagccctaatgtgctcaaggactagtctgggccagttgagtctatgtggatttggaggacataaccataaaacccgctcagtagaagaatggggactgtctccatgcttcacaaatcatttctccagtctctgtggccaaagaccctttgatgatattttggaaaagtagacgcaacaagaaaaattaatacattttagtgatccagggagtaagcgttgaacaatatgcttgaggatcccagccaccaacattgactaggtaaccatcttagatcagttgtggtatctaggaaaccctctgaaacagtcccaggaagtggggagaggaattgaggggaacacaaggacaccggtttctaatagaaacagcggaggcagcaagccagaaccacggtatctcctgcatgcaaatgagaacaaatcctcactttttacttgggttaataaggcttttgtaaacaaccccccccccaacccaacacacataccacctattcaattgacttctcctaccataagaccaacagtaggtattacagagccctgactgtaatcacaaaagatgttctttctgtctggtaagttgactccttggtcagtttaagatgtggacttgggtgtctcttattttttagcttccagatttattggtcctgagtaggccttggaatcagcacagttctaagctcatctttttctcccactctgagaaactgagacccttcagaatgtgaccagtcttgttgacaccccatgtataactagtgtgagggagtaactatgaccagggcttgaaaatacctccaaatgctgtctgaactggataaaaataatgaaagcaagacaaactataaagcaaccagtgctgtttggttcctttgcttgatttaaacattctttaaactctaatctcttctgcactattgtctaaaaggatgcaatggtctggacatgaggaagccttgttctcttaggtgtcctattttagatgtaggaacatgtcaaatgttccagcctctaagggcgggccatgtgggtggatcaccatctgatgcctgggacgcctgagagtgaagtcactccacaccacctttagctacagatcacatgatttcctgccctgtcatggcagagacttgggggttggctggtggccatgtgtctgggagtttgactgtatgtcaggctccccagtggactgttcaaagcttgtgttcatgctaaagagtgtccaacatgtttgtccagcattctcccagttagtgagcccaactcaagatgagtcccaggggctggatgcggtccatgcagtcattttgttggaatagcatttctggcatggaactatgggtcattcaaaagttcctcattatgttttgctgttgacagctgacataattttttctcagcccaattcatgtgcacaatcagaagtgcttcaagatttaccctaagatggaaacagggactgaaggacagaggacttggcaggcactgagtagctctgagaatcctgaaccaactaaatattgtgttgcctatcagcagctaaattagaattgttcctagttactgctaattttttttttgctgtgtcattctggttagttctttgtcctgcctctaaaactaactctctctctctctctctctctctctctctctctctctctctctcctcttctctcgcccctagtgctggaactttgcctgttaccttccgttgcttggaagataatctagggattgacaagcgtgtgaccagattcgtcctcccagtcggagcaaccattaacatggatggcacagccctttacgaggctgtggcagccatcttcatagcccaaatgaatggggtcatcttggatggaggtcagattgtgactgtaaggtgagtgacgtgcatgcagaggacacagagacatccggctcccccagtcccactccataccaccctcacttgacagaagctccttgagtttcagctctagtgagaacacagtgaaggaattactgacagacttcaaagggaggaggttgtagcaggaaggaaagggagtctgtcccatctgtatgtattgcacatgcccactggcgcccagatcccgtttgactgttaacagtcctataaatttggccgtacagttatttctatgcttatccaacacacaaggttggaagtattgtggtttatccaaggctactcatgagctggcatggcatggctgtagctgtggtgacttttacttattctgggcccaattagtctgttattaaaatattgtaggtgagagagttcagtggatgaaaggtgcttgccaccagacgttaaccctgaggccctacataatggaaaaagacaactacctcttaagttgtcctctggtccctatacatgtactgtataaacacctagacatgccaaattaatatttaaaacatgctgctttcactattccaaggtacatggtgaactacaaagattcctcagtacagcatagattagttgagtgaatacttttttgtaaataagtggtacacggctctgctttcactgaagcttttatttactctctggctttatttttttttttaattgagaacattgtccggagagctcatctaaaacgagctgtttcaccacagactcagatcttatttgtagtcattgaacgcttcagtctccaaaccgctcagtgttgcactgacactgtaccataaggtcattttagtatcgccatatctactccaattaggagcttctggtaaatcagaagacagtttctgcctctaattaaagtagaagaaaaacaaagcaaaacaaacaaacaaacaaacaaaacagttaactacctcctggtcccacttacatctcacccccactcccagagtatcaaagtcctcatctacaaatgaggaaggtctttagcactggggactgtgaagtggcagttggtggggctgaagcaagccagagccttactgtttgctctgtaatatgctgtaaaatcattagaacgttaatgtcttctaagacaggtgttctccatttactgactacccctgctccttatcacccagacttagcctggtcacctactatcaactgcctgtcgctttaaaacataaagttatagctttgggatgctgtgaactacgtttcctttctctctcacattctatgagatcagtaaatacaaaggataggtggatcacagtctgtgtaatcaatgtacttgctggcaaaagaaaattccaaagaactataataatcccggccccactgatttactcagagaacagattaggttgacagggaaataactttcagtttctcaaatgagaacagttccagtcctctggcgcccctgagctggcattcttcatggctcccttcagacattcccagcagtctgaaaaggaaggatggccattgtcctcatttcaaggaacactaatacaagcctacgggtgtttgtgtgcaagacctagttttcagggttgtcgatgccatagaccggagtcacatgatgattccttaggcaacatctttccattttgtactctttccttcctgactttaactcaacggaagctcttagaataacagctttattggtcttatctgcattgtacatgaggaagaggccatgtgtccagattcatatagaggccttttcctcccatcaaaccctgaacagcacggtcctcctctgctttagacattctgctgacagccggtgtgtgtctgtctggcccacaactgatgtaccagttcattctcagggaggtctttagtgatcttagggtcaccttaggtgctgctcataagagatgccgttcatttctttctgatttctctacatgttgaggttattggcactgggaactgaaattctcagtgttttatgagttaataccctagagcatctgccctgtcagagctgtgcctcctttatctatctgggagccttttagccagcttggagctatttttgctgggttaccagttccttcctgatagccattccagaagatttttaatgagcattccatacacatcagagcttggccgtacaactaagtaagaaaacaaagaaaatgaaacctcgccagatttaacacatgatctggaaatacaaataatgccctgtgaagccacctcacctggcaaatgaggacaccaagactcagagagtccagccatttagaagctggctaaaattcaggtccccgaattctgatatattcttctgcttactgaggatcttaatgtgtggcctttggggtgtctttagaaaaatgggtactgtgttctgtctatcttagctggtgataaaaaaataaaaccataaaggaagaaaaagcttgcccaagatcatgtctattagtggtgcagtaggattcaaacccaggctacctaaatgtgggccacactgcctctggtataatgcgattgggctgcctttgtatgttgattgatctgaccttcacaaacacctcgtattgtatatgctagagtagaacctccatctcctcatgtgtaccatggcaacagcaatcacagaattggggtggttaggagcatcatacatgacacatatcacatatcagtagatgggagctattggaattgttcctacccagtgacgttcagtaaaatataaccgtggtcctgtaatacgaaatgagaaagcagctgtgacacagggagtgccacaagttactcaggatggaaaacttgcttcagattccagtatgaagcatgaatcttgtccaaacacatatcacatgagacttccaacttcccactcatcaaaactcttgacttaatgaagctgttggcaaagtaatgatagctttatgtcctttcattcttggccctgacagcaatcaggcttaccctccagtgcacaatgggattagaatcagagcagtgactgcaagaccggtatttcactgatattacagaattccatttacttgtaatttatttcatattaacaatgctactgttgtgaaatttcatgagcaaaggataaggttgactacatatgtttaagtctttgcttctgaataaacttagccaaaatctccttaatttttagaaatatgaaagtttggcttacataggcacctgcatggcatatgcacagttctctgcctgcaatgtatttggggaaaaatagccaagtctagctttatgctgtgctattgtgtgaatcctaattctctcttctccctcatgtaggagtacaatgaccaagaactttctgtatatttattaagttatagagcttccagggtcatcaagagccagcatgtagcagaagcaaacagaggggtgttcaaatcccagaagaccacattgaatttgtgtgaccctaagttacctgatccatggaatcgctggttgtctcatggtgaaagaagctgtttatgtgccttgcgtggttactgtgaggttctgctttgatgttgtgtacacagagcttggcacaacctccagcaaccagcctcgagagaagccagccaggggagtggactcccagacaaagcagaatgggtcaagggaccaggagaaggctgagaattttctagataatactgtccataagggggggggggttactaatatttgactcctaacaagatttttcacagtgcttgtaagagtgactcatgaccagagcaacccagattgtaaacaaaacagccaaggctaaggatgactggaacctgggaatccccacttcctttctgtcctgtcaatactggggacgggctgaagagtctttgctgtctgggactttagggaagtttcactcccacagctgtctcaccttgtcctcaagtgcccgataagaatgatagattacttggcttgagggttgtaatgtgccctacctctcttaagtgcccatgtacttattggttcctaaatgccgccggccactacatgaaagagaaaccctcatttatcctttcaaccggtgaggaagtcaggatacagttgcccaaattttgtatgttgttgacaagtggtagagctaggatttgaatttagattgtttaagttcaaaaagctgctacacactgtatctgctgtctcatatggagttctatgaaatataccagctccatactggtgtgacaggcacagacatgatcactggtgtgacaggaaagggcacagacatgttctgtattgtatgtatgtagacatgcaataaacccgaaaggggtagcaaaatacaccaaacatcccagtcccttggagctccagggacctccaaattgttctcagttacaagtcttgggattctaggctgggccacactgatggcctgacttggccaaaccctcccatgagcctggagtgcttgctctagaaatattttaatgttttaactacaaagcaggcaaccctcattgtttcagcacatacaaagtcacatgagagacctattttcagaagactgttctattcagaagcgacagctctggatatcaggatatggcttacttgtcaatcacaagctagattccaaaacccacataaaaatactaggtatggaaacaagtgtgtttagtgctaacatggagagtgaagaaacaggcagatgcctagcagacagctgccagctggtgagctctaacccaatgagaaattctgcctcaaagagggtggattgtatctaaaggtagcatcagagattgtcctctgacctctacagcatatatactcatatgttcatgtgcaccccaacatacatactcacaaacagttaacaaataaaaagaagaaatgattgcttctgtaaaataacctacgaagatgagaaaagtcactgccagttggtgatcctcagaaaccctttggtatgtagacaggacacctgaacccaagattaaactttaaactctggggaaagagttcaaaatggtcccaggtatgctcctaatattgcttgaaaagttgatgaaaagaaaagttgagaaatttttctttattccattaccattttatggcaccctctttctgaataatgcattttccagccttgggagaaatggccaggcaagtgaaaccgaatgtatcttggaatatgttgtttgcctcccctggtgagttggttctggatattttctattccaagttcccatgctaagcattggcaatgacctactcagactccggccacatagtctgaagaactgtgtggtacccacagactcatggaggcataaccagaattgaatgcagttgtgttcccataggaggggtgaggttgatttatttcttcatttttaatacttccgtatctgcttttagaactttacctgctttagtcctgtgtacattagactaactaggtatcatgccaaggatatgactccaatctgtgaatttataagtgcccctcattgttgaactcagttcctgggtattagtatttcatatttcttcattccctggagaaaaaaaggaagggatttttaatgtctggaggaaaattggaaggtgttgttgttgctgctgttttttaaaatatctctaagattgccaagactctttctcttcctgtaacctgggcttctctgtctttgcagccttacagccaccctggcgagcattggtgcagccagtattcccagcgccgggctggtcaccatgctcctcattctcacagctgtgggcctgccaacggaggatatcagtctgctggtggcggtggactggctgctgtaagtgcccgtgggttgggttcttctagggattgtgagtagggatccccaatattggggattccggggtgtacagttgacaagattgcaataagacagccaattctccacgttcccctcctctcccttctacaaaggttactatgtctacccaggaaagaactcaaaagtaatttgaggaccttgtaggctagtggaggaatcagacaaatcacaatacaacaataaaatgcagcaaagagaaggggcttgggatacagctcagttggtagagtgtttgcatagcactgtgtaaaccaggcagcatgattcacgtgtgtattcccagcactggggaggtgtagtgaagaatcaagatcatccttggcctcacagtgagttctgaggctaccctgggctatgtgaggccctgtctcaaaaaaaaaaaaaaagtagctgtaatgatccaactaatggtacatgcaaagaatctcaaaacatcctcctgagtgaatggagccaggcacaaaagaatgtgaatgtaagtaactgtgtctgcatgaagctctaggggaaaacactatagccacagcagtagaaagtgatcaggggtgcctggcatcgtggtacaaggaacactgaagaatggtggaaatgtcccacattcacaagtgtttatatttgttaaaacttgttacactgtgtttaaataaatgggcacattttaacatccataaatttcaattaagtaaagtgtattttaaggcaacatacagttaggagcacagggatggagagagttatctatgctagtctaagatggaagggtaaacagactatcagaaaacagtaaaagtggttgctgaattagagtgcacagtgtgtgaccgctcctataacaagctatactagtctgaaagtctgaaaatccccgtatcgtaggtcaggacattgagctttgactcaggaatgggcagagatttgaccctaggtcaacttggttctggattccatcacattcttgttcatggtcagattcaactttcagaagggaacaagaactgtgctcagacataagtgatgagaagcccagagccactgaggtggaagagaaacagtgcttccctgtcaagccagctgtgccaaggccctgggacagcaaacactgtggtgtctcttaagtaaaggaaggtgaggttagatggacaatacctttggaggccatgtcagggagcttgaatctgactgcatgcatttagtctgactgcatttcccagtgaagaacattttgtagtgtagaagattcatagcccgttcacaactgtgggaaagcctgcccagatcatccccaagcaacgagactaaaatagagctcctctaagggcccctgtgaggacactgctgtgccttgagactcgtgccaatgggtcatgcccactcttggagttaagtgacagagtgctggacagtgtcatggatcttaacatcagaggtacactgtgacaagtgtggacagagatagaatctctgtccacaatgcctgcacttcctttacaaagagccagtgttttgattagcataaattctaggaggaagaagccacattttatggatttatagttttaactcctccatacccctactcttccaaaaaaaaaatgcaactgaagggacataggacatgaggaatggctagaaggaagcctggcctctttatcttctgtgcctggtgttggtgcacgcagtggggaccaggtttggagcaaaaagaggctctgtggacaccatgtgttcaatcccccagggcatctggaaagctagggcacttcctggcttccttgttcatcatctgagctgtgttgtggagatgacttgattgatcatgttgtctctgccagcctctcacatcctggtggaaggtccttctctgataacttgcggttttgttttgttttgctttgtttttctgtgccctgagttggtaccaaaagaccatgccatctgctcagatgaggcagctatgagttagtggtgcaggtgggaaggacaaggagggagcaaaataaagaaaacaaaggtgtggctaaagatgaatgtgaaaagggatcaaggagaaagaaaagcatcaccagtgtctagggacaaaggatgtagagccagtctgctgaccgaccttaacctcagaagaaaggtgacaaaggaagttgtttaagttcacccccttcccctattacttgttgcttccattctctcccagttctgtgtctcttaaacctcctcaggtcctgctgtaaatctactgcctcatctcttcttggacttgtttctgaagcttgcaatccaccattagacctcatcttttcagggctgggtgggggcggggcgggaggatagctcacttagtaattgccttgcaagcctaaggacctgagttcagtctccaaaaaatagcaggagtgggccagcaagagggcttagtgagagaacccccttcacaaggttgtcctctgacttcagcatatgtgtggtggcacccacattcacacagactacacccacacacacacctgcacacacaggaacatatacacttgtgcttgtatgtgtgcacacaaatgcacacatgagaaatttaatctattaaatgtgcactggtgtagcattcctctcattataatcccagcatttctgagtggcaagaatgcagtcacttgatccagaactagggaaagacatggatatttggtaggcactgcagcatcttagcgtctgcttttcatttacccctgaagagctctgtggtatgtgggttagatgaggaaactgttaatcagaaaagtcagtatcttgcatggcgtggtggtgcccacctttaattccagcacttgggaggcagaggcaggtaatctctgtgagttcaaggtcagcctggtctacagatggaggtccaggatagccagggctacatagagaaactctatctcaataaaacaaacaaacaaacaaacaaagcaaccaaaccaaacaaaaagaatagcccgtgtgttgctttcattttaacagaattaacagaggtaggactttaagaactgcttgctccaggaagagtggtgctagtgccgtcacacctaccccctttcctcttgctttgtcctgttaccttctgccctatgatggcacagattggccaccccaggttctggtgcttttcacctatgacttctcagcctctataaatctaagacaatcaatttctgttctttatacattccagtctcgagtattttgttacagtacctcaaatggacaaagacatccctgattctatgtaataataaccagagacccttttatttgtgcttagtttatttttttttcctctaagattaaaatataaccagtaacctaaatagggaacaatgaagtaggatcaaagccttagggactcttaaaattcaagttctctagccccagcaagtctgccactgcagccctggatttcttggcagtctcctgctctcaagcctgttggaagaggattgcttcatgaaatattgaagaccttgcctacatctgacctaaatgttagcaaatgaaaaaggagggttgagtcctctcagatcacaccatgcagatgctcgcctgctcacagttgtgtagagaatggtgtcctttaagtctgtagtgtgccagcaggaaggagcagggtgagcaccactgatcactcccccccaccccaatgatccatcagaattaatttccctaacaaaaccacacaaggaaacaaaccaaaacaacaaaaacaaacaaacaaacaaccagtcctgagctggaatgggaaagaagaggaccaatgaaaagctttttctaattctaagacttagaggggctgaggccatgtgatcaagaagggaaggagggctgggtgttggtggcgcactcctttaatcccagcactcaggaggcagaggcaggcagatttctgagtttgagcccagcctggtctacagagtgagttccaggacagagaaaccctgtttcgaaaacaaccaaaaaaaaaaaaaaaaaaaaaaaagaagggaggaagcatgggggatcttgggtagatggacatcgggtgtggattaggtctgctttgaatcagtaccgatcccaccttcttccataccagtgagagttctagaaacaagcgcttgagcttgctaaactccatggctttgatgtccactggtgtgtaagtgggaatggggctaggttgagatatgagtgaaagacaaggctggctgttcttcagaaaagtagttgatgacagaagagtagaaagaaagagagtagggtaagttttttcctctttaggcaaagtctgtaagcttttcataacactagcaatttttccatttaaaaccaaacagaggccacagtgacatttagtgtgtcacaatgtttgccaactgctagagtctagtcttattacagcccactcagccctagattccttgtctgtaaatgtcatggtgaaaaacctagattctagagcatttcacatgcccaagtcctgaagtatgggaaaggcagccatggttaatacttagcccggctcctgaaaccctttgtatcaaaactcagatctttataagaaactgtaggaagataatgaggggagtccaaaggaaaactgaaataaaactgatgccagagacagataatgaatccctgggcccatcaagatccaaaaaggaaaagccacacacagtgatagcatcgtggatgtgtggtccacttctcatatgacactcttagggagatctttcctggactcgtgtttgccaagtaagggtaggtataactgtgttagtgctcctctctggagggagcacagctctgatcctcaaactgagtctgcagtcattctgatgtggacccaggaggtctacagaacagacatttgtaccaggttcccaggtggtgctggtggtagagtccaggaatcttaattctgggagactgagctggatggagtatggaaggagtgtctggtcagcccgaatctggtgatctaagcatctgtattgagtgactattgccagtttatacagccattcaatgaaattgcattgtaagggagttgagtgctagatattattctgatcacttagcactgattcatttaaaagttacagcaaattataagaaatctaatagtacatgccctatgtagttgtaacggagaggtgtgatttatcatttttaataactattaaatgagcaatatataattcaaatagtaacaacttggatatttcttaagtattgtaggagtgagaagataggttctctgatccttatttaatccatgtgcaaatgtcttaaatacacccacataaatacatgtgctcacgcatactcgcacaccacaccactgccgcctccacactacatccaaaacttacttagcttccactctattcctgatggaaaaggaaaccaactcccacatccactgtctctctgaagactctagaagctttgtgtttatgtcattctttggattttattcttaatgcatacagatttctcctttttatcttatctccgatgtatatcagtcactgtggaatgcgatccacacttcaccaagccttccccttccaacccgtgggcctctggcccaaggcaaggcaatcatagatccagagggtaggtggatgcctcagtctgaccagcaacgctatctttaatctgtcacaaaaagctaaagggagtcagagaatgaaatggaaagtctcttacctgcagttgagtcttagtgttctctgaaccctaaatttatagttaggatatatcagcatagaaatttttttttaaaaagcacttttgttttatttttatttatgtccatgggtctctgtgtagggatgtgcatgtgagtgtggtttcctggtccagaagagggttttagttgtgagctacctcctgtggatgctgagaatcaaactcaggtcctttgcaaagaacaatacaggcctgtaactgcggagcctgccccagcaatggaaactgtaatcctggggatctcttcctctaaaactcaactttgtaatgtttgaagatcacctcttaaaaccttccctccctcaacttgaccatttcgagtctttttgtcttgccaagtcctcttgctcttcttgttgagtctcttcccagatcttggttcacctctttcagtctggattctatgactctctcctcttggagatgatgcttgcatctttgcttttcactgtgcaaagcctgccatatgttttgctaaacaaacaaccctttctttctctttagtttatctgcttctaatccaaatgaaggatccattctgttcttgctcctgctcctatctatctcccaagtcttccagcctgctccaggctgcaccgaatgctcacaactctctctggtttctgtgttctcagacttaaccaagtgtgatagaaaccatcttttaataatgcatctgatccattcatgtacagatacttttgtcttatgagtctacccaaaacaatacagcacaggtgcttacatagtgtccccactgtaatggggactgagagtgatctagaggcgatttaagagatgcctgaagggtagaagcaaatgttaggacatttggtgcatggggcttgagcatctgtggctttggatatctgtgggaggtcctgaagccaatcttccatagaaactataaaacatgatttctgtattcaaagagcatgcacaggagtaaagaactttcaaaacaacaaccagatgttgtgtgctcaagaaatcccagcagtgctagttgaaaagtgaggagtgtgcatctggtgagggaaatgaagaagtgaactccccacttggctaataatagcaatcccttgagcagttaaagaaatggagcttgttttgtgcctcaccagcctttcatatgcaaagggttttgtgtggagcctctgggcagttattatcttcccctcaggtgagtgttgttctgattctgacaaatgagaactctgcgtaggaagagctaactaacctgcctgttaaagccatgagcgtatcccaggctggaatccaatctcatcataaccaacagtcaggtgattttagcactccaatgccagccgtccccagggtaggaaccctaggtgaccagttgctgccacacagggctcgtaaagagagtacctcactctggcaccctgtcctctgagaatgtgcattatgctttgactctacttggttaagttctgacactcggagcatttggttcttttacatctgcaacaatgatcatcattaggatttagcacatgacaaagacccagatgaactgtgagtgacccagactttctgtgagaactcagacctacagacagtctctcacctccctgccagaggactcagaccaagagaagaaaagagccagactaccttggcagttcgttcttcaaggaagccagacccagtgactggtgtgaagggttgttcagctccctcttggttttggttcctgccagcccagaaagaagagctgagccatttatagtggattcattagatgcaagcttctgcttccaactccttgactttcctgccatcctggcagacagaatcccagaggcagcatcaacaaatctattcctttttctttttatcatttcttctttcactctctttccttccttctcttctcctcctctttttcttccttttcgtctcaatctcccccacccctgcaaccccctgtttctctctctactactgaggtcatcatgaaagttagactttccccagagatctggagtaacaatgatagaaagtgaaagttatttgcttatggaaaagtttccacatatgaaatagaaattctcatattcttcttggggtcaaagttgtactttcctcgagccagtaagacgtttccctggtagtttagaagtttcttgtctttgcagtattttcggggggggggatataactagaatatccatgattgatcttctgactggacaacttgggaattttcccaggatgcataatgacagaggagggtggcaggatggggcttgatctcagttggattcttgctgtttgacatacatgtcatcttttgatgtatgccaactcctgaggaaccctcttccataaactttccctctgccccttctcttctatagtgataaaattgagtcccctgccaaattatgactgtcactgcacttcagatgccatcctctcaaatctgtccaggaggcattgccagagatcatcattgtttctctgaccctttagtcctgtcttttcaatgggcttcctttcatatttagtcaccgtcacaaatttcaaaataaacacagcacagaaatccctttccatattctctgcctctgtcgtcagctgttctttcctttcctttcctttcctttcctttcctttcctttcctttcctttcctttcctttcctttcctttccttcttggaagaggtgatttatatagacatccatagtgtttctatgactcctcacaactgttacccaacttgcaagagccaggttctgtccttacaaactgctctctgtggatcaacaacagtctctttgttactaaaacttacgcatacttctatttttttctaaggactcaaggggataattggtattgtctgccacactctgcctattatagcagttggagtgaaaatagggttaatgttttcagagggagacagtagctgaactagtcatgtttggatgtgttgcctagaaactgccaaaatacatttgaattggctggataaaacttatagtaatactatatgtacctcataatcagtgtaaatagctttcttaagtgggttttagcaagtgcttgaaactgtggtaagcattttgtttatattgttttcctgccataacaaccctgtgcgctggccatgtttgttgtttcatttttgagaaggtcccttgtctgctcagaccttctagcaggtaagggacaaaactcaaacttgcatctgagccaggcagcctcgggagtccatcccttgactctttcccactgtggtgctatgggtaaaacccgagtccttgcacatactagataactcctttttctctgagctacatcccaaccatttatttctgctgatatacataaaattatgtgtataattttatgttttaaaacacaaaactcacaattatatatattagaggtaccccataatatcttgatgcgtgtgtagtgctttaattgtgttaaatatgtatgtcttctcaggagcaatttctatacgatgaaaactccccacattcttcttttatctttgaggtgtacagaacatttctggtgtccttgtgaccgtgatgtgcactagcaccctgggctttcttactcccatctgagtgtgtaacaccttgtcttaatgcctgccctttttgtacacttatgctgggggtggggtggggggttcttaaccatcagctccaagtgatatagatgtcctcaggcctaattcttcattcaggtgaagactccaccacccctcacctcagccannnnnnnnnnnnnnnnnnnnatcccaaccatttatttctgctgatatacataaaattatgtgtataattttatgttttaaaacacaaaactcacaattatatatattagaggtaccccataatatcttgatgcgtgtgtagtgctttaattgtgttaaatatgtatgtcttctcaggagcaatttctatacgatgaaaactccccacattcttcttttatctttgaggtgtacagaacatttctggtgtccttgtgaccgtgatgtgcactagcaccctgggctttcttactcccatctgagtgtgtaacaccttgtcttaatgcctgccctttttgtacacttatgctgggggtggggtggggggattaaacatgcaaacgacattctcgatcaatgcaaaaaaagtagatgaataagaaaagagtaggtggggtgagcggctccgtgtcccgcggccgaggagtaaaccattttggcctggtttcagggggaatggcccttgttgcccccgcgctcacttctccgccgcctcgggaccgcaggcgaaaaatagcacgcgggttgccccaccctgcacccgcggcgggtcggggctggcttgtcccagctgaccccgccgcgaagccctccgagctatgcgcagctcgtccctcgtgcctcggcggccgctggcccgcgcggcccctgcggagaagccccacacttccctactgcgactactccgcagcgacgctcttgcctctctcccgtctcggtaacctttggtatgtgctcagtcaatcaccggatacggcgtttgctcgggcacacaccagcccccgccctataggcttgcaagtccgggcgggtgctcagcacacacgccgcgcccagagccccgccgagcagccacgcggccgtacgccgacgcctatcgctcactcgggcggcccgagatccgacgcccgagtagcatgctaccgcgtttgcgtacgttaattgtatccgccgtgctggctactctcatatgcatgcgtaccacgtaaccccggccccgctcaatgcataccacccaacgtcctccgtgcctcccgaccgcccgacagacggcacccctatcagcgnnnnnnnnnnnnnnnnnnnnctcccgtgggggtgggggggttcttaaccatcagctccaagtgatatagatgtcctcaggcctaattcttcattcaggtgaagactccaccacccctcacctcagccagattctcgagtgcagaagagggactcagtgcattcaaaggcagaggcacacccaagagttcaagttcagctctgatcacttgacacccaccccaccaccagcaccatgggcatacttgcctggttgaaatcaggacctctggacttataagggagccacaccaagctcctcctagtgcagcttcattattcccacttcctaatgacaggtagatttcatcacaacaactaggctttattttaggtcattgtcttaattttaaaatcaacatttccactctgtgacttaatcttagtcatagaatttgaatgaaaggggagtgtcctcactaatgctctcctagtaatagcattaccccatctcctgtctcttctctgcacatttacttacttgtttactgacttacctctctagtggctttccagctcatttatgggtagaactttggaggtgtaggaaatgtcatcagaggctccttcaacaaaccagcttatgctccccaatgggaaagcgcagctacctttaagaatgtagtgagctttcctggtgatgattttctaagatgagtttttgttttgttttgttttgttttgtattgtattttattaacaaccactttttttttccaatacagaatttgtaacctaagtcacgaggaggagggaaaatactctggatacttgctggttctagcagcactctgaaatattcttcttaggttcatagaaagggcaatttctaacgcaacctttgtttttcatctttagggatagaatgagaacttcagtcaatgtggtgggcgattcttttggggctgggattgtctatcacctttccaagtctgagctggacaccattgactcccaacaccgaatgcaggaagacatcgaaatgaccaagacgcagtccatttacgacgacaagaaccacagggaaagcaactctaatcagtgtgtctatgccgcacacaactctgtcgtaatagatgagtgcaaggtacctttcccattcctggatatcgagacctgcatatgaatagtgcatgctggactccttaaaaaaaaatcacaaccccttgcatccattcttaccatgctttgtaaggaatcatgtcacccaagctcctgtggggcccagaccatctcactctgcatccagcatggtgggacatcagcaagtctgacaccaaaaggaccaatcagttgcttacttcaacagattcccacatccacctcacccctctaatttggtcaatattcttcactctttgggccaagaattggtggttgtcagaactttaatggccttcagatattctcttcctcaaaggaagggtcagaaaaatgtagaccaaatattattgactttatatagcatgagtattcctccctactctgtattacaaattgcttttttaaaagctcatataaaagtttaattggctgtcttccttttattttttatttttaaattataattatttatttttttcttaggaggataagttgtagttcagcttttattttgcatcccaaatgggtatgcagtttcaagaataattgtcctccaaaacagttatccagaaagttttttttttttttttttttttttaatgctaagtatcacacactccagttctcctgcagtgtgggtgttctgggttttccttcaagctgttgggtgccaagtcttcaaggttgatcggctctagctggccttcactgtaactaacttgacattgacaaagacagtgtcatgaccagagtgatgcaaacttggagaaaccctggcagatgggagaagggttagcttgctaaatgactgagtgtattagctgaggccagtttgaatctgtagcaatcccgtctacctttttttatggctgaggatacaatcacatttaatctttcttccttaagtcttgagtccaagtagcaccgttgtttctgccagagagttacagctaactgtcccatcttcttgactgtataccataggtccagagtactaatggaccagagagtcttgcttgcgctcactatatcaagtacatgtgcaggagagccagagcttggctacaaactggggcattagactatttttaattaattaattggcaagacaaaaatgatttccttttaaaaaatttcagatatgcgtttggggctattgtccatcttctagaaacattactgcttttcacattcaagtaaatgggttaagttcctttccacagaaatgttagtttggattaataagggtcaccattctcatggaatgacttttatcttatatttatcaagtatttattgtgtgccttgtatgatttactggtgtgtcctcacccttccccgtggcatccgtgttttgatcattctccaggtatttagtgcttatagctatagaaccctgacttatatactggagttatacaaacaagaatatgcagcataatacaagaaagaaggtcctacctcagatcgttgtcatgtaaggaagcataggatgtgacaaagtagagtcaccataattattttttttgttgtttcacagttatgtgtaaaaagaatcctaatcaatgctgggagcttcttggggcagggggagcttctcaaatggcttcttaagactttggagagagtttttaaaaagtacagtatagagggaaggagatggttttggacttcagacttactacttttcatttcttaaggattgcaagagtatttactatgtgtttaaagcaaaattttgcaagctatagatggagaaatgtaggctctgtcagtataaatcaagccagtcaacagtgctcttggtcttggctcatcatcatgtccaactcctcaaacagtgtctaggctgttgtaggcactcaataaatatttgttgaataaaacccactagcattgtgattccatgccgtgcttatatagccttcttttgattggactatagagctagtagttcagtttctccatacaactgactacccaatcaacctcctgcatccttgtagagtaattagcacttagatggtcaatattcaatctgagcatgctgttaggataacggatctgggtatactggttctataaatatcttagaggtttgtgttgttagttaggtgattgcctttagctctttgaaggggaccctagccccaggcttctcactcttgagtcagctacctgtgtggtcactgatgtagaaggcagggagagctatgtgcttaaatgacccttttcctaagtatctggctcacatgtgttcatttctttggacttctttctagttaactctcaccaccaccactttttcggtccagtttttagagcccagcaagaagagcatcaatgctccttgccaaggccctacccttgactgaacaagacagggatagaatgggttagaaggtggcttccagcttttttggttcagcaaaggttcaactacctttgaaatataggtcccaatatttacaaacaaaaagcaaacatctcccacatgctgtctggttcttccaggataccacattatgattgatagctgtgcactgccattgatgagattaatcattaagagccaaataggcacattcaaggccacaaggaataggcagatttctccagtccgtccctggtagtttttcttgacattttattgaaggggaaaccagtttgctgcagctctggtcaaaactactttcaagcattgttatgtcatgctggtgtcttcataaccgtagtttggagttttgcaatagccttttaattctcctttaagtaacagcatgtgagccatcactgctaattgcatggactttctaagtgtttgggcagggtggggagcatgtactaatgtgaattggatgaatgaatagtgtttttattttcattgcatggttcgtgaagggcacctggttctctgttcccagcatgctgcatgctcttgatgcatgcatttcattcccacttgggtaaaaaggaggtccgatttctttcaaactttgctgcatttgtcatgtctccatatcctaatgcttccataaatccagtctcttcattatgtggaatatcagtcgtgggtttaagtttgcacatgaccttgaggacagacagacagaaggtaagctaggaaacctgcttagaagtggatgggagaacttccctcctgcataaaggttcagtttgctctgggccagagaaacagaatgtaattataggttcccaaatatctacatcaaaatgatgtggaatgcattgctactgatccctccacttccaaacatttcccgttttaatttctaaagccaagaagacttattcagtaaagccaaaacatcataaagtcagtaatcaagactgaacatgtatgaaattcccctagcctcactgtgactgaaccttttacatgcatgagtagaagtagctgcctaattctggattgctttctgtatggttgtatggagtagcacatggcactcactgtattttaaggactacagtggtatgtgatgggtctttgggtagtgatatattctacaatcctaaaaatgttgttgaagatgtccctaaactgctgagaatccgtgatctttcaggcaaatatggataattcaactctccattcagtaatgaaaatcaagatgggttcaaaactaattttgaaggaataccatttaaaactatggtttccccatacactgtaagcttggatctggtgcttctccacatgacccatgggaggtgtttcttgtggttcgtggcctgtaagttggatgttgatggtaattgttttcaggtaactctggcggccaatggaaagtcagctgactgcagtgttgaggaagaaccttggaaacgtgaaaaataatgacccgattctcagccaattcttgaataaactccccagcgtatcttatggtaaaagatgctctctaaacaggcttcctttacaaaaggaaaagatgcatatgtttctatgtttacttaatctgttagctgaggcatagaggagctgtgtacacccgtgatgataggcaccgtgctgtgtctttgccaaataatgctttataactgtctaattttcttacttgtgttattgtttgaatggacgctgctggagaaactactttgaatggaagacgtgttcttgccagcttccttttgtctcagtgcaacactgtggatgctattttttttccaaggggacaggatgaaagcagtgtggtaccctccagggacttaagacaacgagcacacatgtgctgtcttccttaaagtgttcatggctcaccttgttctacacaaaagattctgcttgaagcttctagaattacctcccctccagcctgtagagagttggcacctacattgattgaaagcatctgcctgggggaactctgacaacttacctttttgtgcactgtctaagtagaatgtttcagagtttcatgggtgcccatactctgaaatgcaggtgaccataaaggccacagctctgcctttctgtgtgtgtgtgtgtgtgtgtgtgtgtgtgtgtgtgtgtgtgtgtgagagagagagagagagagagagagagagagagagagagagagatgtgtgtgtgtgaaaaatgtgaaatttcaaatttgaaaatgatctaggaatcatttgcatattaccactgtataccttgaggaaagtgaaggagcatagtcaacttgaattttagtcagaattaaatattccaattctcttgtttgacttgcattcgtagagcatattgaactcaagtgtgatgatctgatctggttttttgttccacccatagattctcacttgagttcctcaccgaaagatatttctaacacccaagtcacttccatcacatccttgtctgcttatatggctgagcacttcagcttcctcacattaagagacacacgttggctatgactcttttcctatcatcctggtatatatctaatatgtagaaagtgtttgttatattaaagcacatgaaaaatatcacaaaacacaaaagttctttggtgagaagggaacagaaaccacacatgtatataaaatcctataaaggttcctatgacagaggccaggcagcctcaaaccatcagatggggaccaagaacggctctacacaactttccagatagaatcctttccggggactgtgaaagtctgaaggaataaataatataattggcacagcatgagggtttgcctgtggtaggcagccaacgaatccttaatgatgggttgtgcaagctaaaattgtggatgtctctattattatcttctgttgaagaatgcacagtattttcctaagatcctgggtttaacggttagcggggaactggaaccactgaaaaacaaaacaaattcaacttgaaggagtgtcggaacccaagccatcagtcagggcatgtgtgtcctctgaagcaggcagagctgaggagacgttcataagcagtaataggacccattgcctctgaagaagggcacggggccatcgtttctcctcttagcccctcttgtgacttctctccttcaaatcagacagctcagacacatacaaaagacaagagattcctgttgctttatctcatgaaccctaactgtttttaaacaaggatcactattgagcagtattaaatgaattagtttgttctgtttcaggttttgacttttgaaacaaggtctttttatgtagcccagaatggcttcaaactctcacacctactgctcagcctcggttctaagatcacaggtgggcaccactgcatcggctggcagaactcttgtttatacttttctgagagacagtgaacagggtagcagtgaccagctgtgaaaccctgaaggaagacaagaagggccaaagggattctgctcagctgtggaactattctagatagcctgtaagtggtaccccagggctctcctatgctgagtagatgtatctaggcaaggcatcaggagcatgctgggttttgctgtgttggggagggaaaggccattccatacaatgagtctccccatacaagaagaaacaaggccacgtgggtacttgaacattgctcttttcttaaaagcactcacaggatgacagtgtttgtcatctcagattctgcctgaaaatctttctaatttgttttatcttcaccaccccccccccagcagtcctgttagcttatgtaaagaagacagagctttcaggagaacaaaggcacattatttctcaagtcaggttttgctgactacatatgctgtctcaagagaatatgctagggaaatcacatttactgaaaatttaataatttttatttaaaataaataatttatcaaattggagacttccctaagaaatctagaatgtgatggaattgacatagtactgtgtcttgcttttgtaagccttgttaaccctttccatgcccattggagattcccttgcctagaaaaggtgcaggaagctgaagaaaaaaaaaaacagatacagagtgtgttctagtagccttagtctaaatagggtacctgtcaccgtgtgtgtattaatagagccatcgtagatctgaatgtccataatgatgattaatcttttatgtgtagttctctctctgcctctgtctctgtctctccctttcatatgcacacacacacacacacacacacacacacacacacacagaacatgtgtgtcacatacactaactccaggaaccagggaggtttgtgtattggggctttggcagtgctattcctgtaacggattcagttaatacttacaaagaatcaaaatcatttcagaaaaaacaaacaagtgagcagacgttcatcttccctgtctcgtcctttccctataagaagtaagacaaatcatcattttattaactgctgagtaaaactcaacaaagtcaattcagccagtgaacagcatggttgtttcgaaggtaaaatttcactgtgggcttctgagggtggcgggacaccagagaatccaggcagccatcaggacctaagcacacaaaacctcagtaaaggcctgtaggtgattttaggaccatgagatcactactgatttggtttttgagcttttttttggggggggggtggtaataaaagcctgtgtggcctcattgcctgtggaaagttttatgttctataaaagacagctagccttttctcctcactagtcactagttagttcggacatttacagagcaaaggaaggactccagaatgtctccagatgaaaacgaagaaagcacggaactgtgtatgaggaattcagtttatggatcagtccctgctgggggatgctgggatctcagtggttcgctgattagggtcaactatggctagaaaatcatggcacatagaagtgcacgtagtcagacacccttcagagagttgaaaggcctcagaagaaaacccaaccctgccttgctgctgtgagtaatcttccctttgttctccgaagtaaaatcttattataatgttcacttttgtcagggtctaggctcttgcctatgcattattttcctcatgcaacaaagcaataaacccaagtaggtattcgcatgctcaggctccgataaacaagccggagcagctcaggcctcctttgatgactaaaatggcagtggttacaaccccggggcaacctgcccggtttgctgctctctttaaggaccaatctgtctgccctgcttttttttttttttcttttctgcttattctgcagctgaactcatgatctatcaggcaggacgaaggaccagatgggattttctagtactgggatactttcagggcttcagggtccaagggtcttaaggagataaggttagcgtctgaagcaagggtttcctaaaccaagttgtcacttgaagattcatggtcaccgcatctacagtagtctctggttaaacccaaaagaaggattactgagtgccaacccagccaggtggcaactgtgacagctaattttccgtgggtggagtgagataaagtctcatcaagaacaccaaccagcttaggattttccctaaaactctcttcccagttcactgccctcgcccttccctttcctttcgtttcattgcttaagagactgcttagtaagtggccaaatagttaagagggggttggcttggaagcagataacaggagatcttaactatcagtaatagccagtctcaccgcctcacaccataatcaggcaatgacacagagatgtttaaaaacaacgtggcttgggagaggaaacatttgattaagacactccccatctgtagctgtaaggctcacacagccactgtgtgcccaggtttcttgcacttccttctgaaatgagaaggaactggaccaactgcagttttctaatctccttccatcttactgttctcaaacatgacttatttatattgtaagtttgaaagacacacaaaatgaatattcaatttaggtgtttccttgtccatgatgagaaaactccaactcaagcttccattcattccatactttacaagcttggagagtggccacagtaacccagtttccagcattcagacatcagtaaatatcctttggttaaaatccctattccccaaactcactgttctcacggaagtggtgattttgctcagggaaatgttctgcaacatcaccgtgagggaccagacacctggagtctgaattttgagttcttgcatcatacctgctgtagcaacagagcccactccaaattctcagcccacatcattttccccaaacagtcctaattgccaaccctgtgtgggaatttgggagcctctggcaaacaagcttgaacactcctgacatttggtgcaagatttacacaacagcaactgtctccacacacctttcccgccaagtacatgcagacgtatacatccattctgcgccttcccccacccccgcccccacccccgccccctggagagaggatttgattgatttcattagaaagttctcctcttgatttacatgcataacagacagcacatcattgggagagatgctgtcacttataagaacggagttttcccatttgccccatgtccgtccatgttcacagagtgtctaagtcattacagcagagagggtggctgcacctaaccttccctggttctgtataaaaggtcatagcttgcattttttgctctctgaccaaatttcaaccagagttaaatggatgtatttagtgtggtgaacatcttcattgccagaaaagatttcagctcttcaaatttgagggagtatagccagttgggaaagggctaattattgttagtggtgatggtggttgggtttttttctcctctcaaggtgacagaagatctatggtgagagcagaaagatgtttcttaattgacctacttaaggtcactgcagaaaagggggagaagtccagaaggtcctgggagattgggttcacactaacactctgaatcatttctgatcagtttttttttttttttctatgctgaatcttgtcttatcctatgatccagttaccagttttggtatttttaagtctttctcattgtattttggggaatttttaggctgagaataaaatctactattggaacagacctgtgctctgcagaggcatcacgtgacccagacaacgggtggcagaatatctgggttcccctggagacacccccaacccctgggtgagctttagaacctaacaacagactgttatccttatcaccatcctctgggacatgggggatgatgcagtcagagccttgctacttctgggctttgtttctctctatggcaaccattttatcctgcctggaaatggcttcctgccctacgtggagagcaggcacacttacagccaaggaagtggtcaaacagatccctaagttctctccatgctacaacaaattccctaatacacacaaccagaaactcagctcctgggtggcttagtacccacaaggtcactttcctgttctaagagccttcggtatccagattcttctacaaaccacctcaactctttcctctttcttccctcctccataaaatctcagcatcccacccccacattgcacaacagtgatcagatcagctggtcactatagagatttgtatatattaaaacaaacctactttttggagaattttttgtatattcttttctatttgttttctacaaattgaggacagagctggcaaactgtgaatctaattttatcttgatgccagcagatatattttagcttcctggtatgaatctatgttactagggacaccatatcaccctctgatcagtattgcacctccaatctacaaagttagtttggcccaatcttacattctctcttccacaaatccccaaatttctttgctattatttatacagagaatatttatagtcctggatattacaagttttaa

SEQ ID NO: 1205 - DNA, 2127 bp, Mus musculus
cagaacttggaagccagtgcacttctacagctgagagaatggtcagtgccaacaatatgcccaagcaggtagaagtgcgcatgcatgacagccacctcagctccgatgagccaaagcaccgaaacctgggcatgcgcatgtgcgacaagctggggaaaaatctcctgctctcactgactgtgtttggtgtcatcctgggagcagtgtgtggcgggctgcttcgcttggcatcgcccatccaccctgatgtggtcatgttgatagccttcccgggggacatactcatgaggatgctgaagatgctcatcctccctcttatcatctccagtttaatcacagggttgtcaggcctggatgctaaagccagcggccgcctaggcacgagagctatggtgtattacatgtccacgaccatcattgccgccgtgctgggggtcatcctggtgttggccatccacccaggcaatcccaaactcaagaagcagctagggcccgggaagaagaacgacgaggtgtctagcctggatgccttcctggatctcattagaaatctcttcccggagaacctggtgcaagcctgtttccagcagattcagacagtgacaaagaaagttctggtggcacctccatctgaggaggccaataccaccaaggcggtcatctccatgttgaatgaaaccatgaacgaggcccctgaagaaactaagatcgttatcaagaagggcctggagttcaaggacgggatgaacgtcttaggtctgatcggattctttattgctttcggcattgccatggggaagatgggtgaacaggccaagctgatggtggagttcttcaacattctgaatgagatcgtgatgaagttagtgatcatgatcatgtggtactcccctctgggtatcgcctgcttgatttgtgggaagatcatcgccatcaaggacttagaagtggttgctaggcagctggggatgtacatgatcaccgtgatcgtgggcctcatcattcacgggggcatctttctccccttgatttactttgtagtgaccagaaaaaatccattctccttttttgctggcatattccaagcctggatcactgctctgggaactgcttccagtgctggaactttgcctgttaccttccgttgcttggaagataatctagggattgacaagcgtgtgaccagattcgtcctcccagtcggagcaaccattaacatggatggcacagccctttacgaggctgtggcagccatcttcatagcccaaatgaatggggtcatcttggatggaggtcagattgtgactgtaagccttacagccaccctggcgagcattggtgcagccagtattcccagcgccgggctggtcaccatgctcctcattctcacagctgtgggcctgccaacggaggatatcagtctgctggtggcggtggactggctgctggatagaatgagaacttcagtcaatgtggtgggcgattcttttggggctgggattgtctatcacctttccaagtctgagctggacaccattgactcccaacaccgaatgcaggaagacatcgaaatgaccaagacgcagtccatttacgacgacaagaaccacagggaaagcaactctaatcagtgtgtctatgccgcacacaactctgtcgtaatagatgagtgcaaggtacctttcccattcctggatatcgagacctgcatatgaatagtgcatgctggactccttaaaaaaaaatcacaaccccttgcatccattcttaccatgctttgtaaggaatcatgtcacccaagctcctgtggggcccagaccatctcactctgcatccagcatggtgggacatcagcaagtctgacaccaaaaggaccaatcagttgcttacttcaacagattcccacatccacctcacccctctaatttggtcaatattcttcactctttgggccaagaattggtggttgtcagaactttaatggccttcagatattctcttcctcaaaggaagggtcagaaaaatgtagaccaaatattattgactttatatagcatgagtattcctccctactctgtattacaaattgcttttttaaaagctcatataaaagtttaattggctgtc

SEQ ID NO: 1206 - protein, 570 aa, Mus musculus
ELGSQCTSTAERMVSANNMPKQVEVRMHDSHLSSDEPKHRNLGMRMCDKLGKNLLLSLTVFGVILGAVCGGLLRLASPIHPDVVMLIAFPGDILMRMLKMLILPLIISSLITGLSGLDAKASGRLGTRAMVYYMSTTIIAAVLGVILVLAIHPGNPKLKKQLGPGKKNDEVSSLDAFLDLIRNLFPENLVQACFQQIQTVTKKVLVAPPSEEANTTKAVISMLNETMNEAPEETKIVIKKGLEFKDGMNVLGLIGFFIAFGIAMGKMGEQAKLMVEFFNILNEIVMKLVIMIMWYSPLGIACLICGKIIAIKDLEVVARQLGMYMITVIVGLIIHGGIFLPLIYFVVTRKNPFSFFAGIFQAWITALGTASSAGTLPVTFRCLEDNLGIDKRVTRFVLPVGATINMDGTALYEAVAAIFIAQMNGVILDGGQIVTVSLTATLASIGAASIPSAGLVTMLLILTAVGLPTEDISLLVAVDWLLDRMRTSVNVVGDSFGAGIVYHLSKSELDTIDSQHRMQEDIEMTKTQSIYDDKNHRESNSNQCVYAAHNSVVIDECKVPFPFLDIETCI

SEQ ID NO: 1207 - DNA, 188794 bp, Homo sapiens
ttgttcttgcgatagtttacagagaatgatggtttaacttcttttctaaagtgattttgggcaagtactaagcttctctacctcagcttcattatctggtaaattggcataataaaatcttgagattttactgtggtagctgtgacaattaagtgagatgttgtgtaaggcaacgaacataatacatggtatacctggcagggtcagggctcttcagctaggcacagctccacaactgcctcggtaggcactccacacatacgtgcccacagcctccatctcctgactgtgtcctgaccctctgcctggaatatcatgttctctacttctttttaacgctctctttactacttgtgttattttctcttcttgccttcctactcagatttggttcacatgtacatcatcttagctatgactctggccccttcagaagctgaatctggcctgaaattttggtaatgacatcccaggctgcttggttaatagctccgtggccatttgccaccacccctggatcttcctaccttagcactgctcttgtgggctatgaacactcgatcacactcacctaagactttgaggcaggcaaagaggatcacacacaagcttgtcccttggccatatctggctgctatcggaatgttgtccatctctttttgtaacatagcccttgcctcccagcatagaactccaaagctagaaatcttgagcatatataagtcaggggcttttcagagaatcagaacttttaacagtcctatggaataagggattacgataaacacacaaaattgtggccactgatggagaagtctgtgcaagactgttgcctttgtttctggtgttggacctaaaatcaatcaggccagtggtcaggaaggaaagctggatgtgaagtcagcaaagcaaggacaaatggaaaactgtgtttgtctcttgctgcctccagcctccatgatgtgagtgacttgtagtagaatcaggtgccctttgctcatagctgcacactcacccagtccgaactcagggaagccagaggaggatttccagcaggcattggaggagctgtgggcctgggtgctttctcaccccaacaagatgagctgacagatagtgacattacgtgtgagctgccacagtgtctgacgtgctcaaacaaatctcaaagcatgaaagtaggcattgcttccctctcctttccaaatctcatgtcaatttctcttgtgttcactctaacctggaaccatacagggaagggaattctgcaacctagtttcagtttccctaagttgacacagaacaaagcagtcacaaattatggaatactaatgctggaaaagtggctgtcaactgaggacaccttcagggagtgccagagaaggctcctgtttcatccagagtactttggttctgatttctttcgtgatgattgcttgtttttttaggtatccatgtagcccctgacatctgacattataccagctgggctttggtgcccaggagttgatctggcactcccaatgagactgcgatgctctcttgttgaagataaatactttcacagaatgccaatatctgtcagaattattctgtgactttgatggatcaagacccaaacaagaccacttcatatcttctgtaataacagacaaaagcaaggtgactatgcaaactacaaaggtgccaaatatccccttctcctcgttaatatgagtgactgctgcttcttcatcaattacagcggtaggctctttatagtcttttttccttttagataagatttattacatggccaattatagaattactcccacttcctgacagcatccaatccagaacaaagccccactttgaaacctaagatcacttaacagaaactcaaatcctgtaagtcctttctaacacactcttgatgaggcaccccttggttcaccatgatgtgcatcctacctcattgcaaggagcaaaaaaatcccacttgttcaattacaggtatgtttctagtggtctttggctggaaggcattgactatatatataatatatacgtatatataatatatatgtatattacaattacaatggcttgacttatgactttttgactttatgatagtatgaaataataaacaccggggactccaaaaggggctgggagtgagggttgaataattacctatttggtctcaaactcccgaactcaggcaatctgcctgccttggcctcccaaagtgctaggattacaggcgtgagccaccatgcctggcctgaatttgggtttttatgttgtcctaacctggacatgaatgaagaccttgagtctcattgcattgacacaactgcatgttgttctaacagagaattatcttaaatgatatcagatgagttaaaagaagaaagctgacagctaatggatgagccaaaggagtaagacacatatctttactcctgccttattttttctccttctttagtatgctatgaaaattttgagtgaaatactttggatccctagggcttggggaagtttatcttttcagggctattggaaagaacattttggagtagcttggtagcaatttgtggtctctccttgcttttcttggcagcaggacttgctttccctggcagagctctgcccggatgtgctgttgaggcccagcattttaagaagactgtctcaatggctgagttttttagggctcacttcacgtttgtattccaattcactgagtgtttatccagaggcttggaagaggtttgatggagagctttgtcaacaaagaaaaaaaagtcagtagataaaattagagaatagctttctcaggtgaggaatacattcaagactgaattcttggagaaaaacgaaccactgttatgttcctgaacttatggtttctaggaaaaagtaattccacacaagagagaaggaaagaatgatctttcttagtgcttaaatatgtgcaattcaggaaaagttgtttattttccattgaaaggggaacagggtgttacaaatgaagctgtgtccaggtgctaataaaatgaaacctcagagtgaactgggataacttccaattcactgcagttatgcaaaggcataatttagtcgtttagtctttgattaaaaaaaaccaacaactctgaatctgtaatctcaatttaaaactaaattacctggttgctatctctctctttctcttattaaggaaaatcactttataagaaaaatacttttgggatgtgatacacagcctttttcagaatgaccaaggaatttcataaagaagcgaacagagaaaatagaacaagaataacattgctggattttctgaggtcatcagattctggcttgggtccttgattcagtcctttatccaaatcacttagcatttaatcacagtgagctgctgttcagcaaagaaatccccccaaagatacaaaaaatctctccattcttttgctcctcatgaggctgtcactactgaatattgtaatgtcccagcagaacaaagggaaggggaagatggaggcattactggcaatcattgccaaggttaagagaaactaggggtagaaattaaaatagcagtaatcactctcaaagagtatttccacttcatacaggatcaagcagctaaaaaaagagacagttgctctaattcaaaatgttatggtttttatggtgggcataaagaatttgcactacccctgacatttagcctcaagtcatcttgtagaagaaatgctgacggagggaatgatatactgagaactcacaattcatctttttccattgtctcctttcttcatctatactaaacaaacgggatgaattcacactctttccgttagaattcatcaggcagtaagcatggctatccactgtttcagccttcccgagccctctacctaatgagacgatttctgcctgcagaatggattatatttagaccaagctctcagtctgaattgagatttctgtgaagtaatatcttttttctcatcagctaagagagtgaggtaaaaatagaactccctgacttctcttttgctaatgtgtgttaacaagaagagtgaatgaactcagcttgtatcttacagctccaaacacccttaagatggatgattcccttgagtctctattcagtgaccaccaccagactgacagggctacaggctggctcatctgtagctgtactgtgttgttgaaaccaaagcattaccactgatcttttgggtgatgagagtgccagcagctaggaagctgacatcataaagatgataacagctcagtgtgccaggaactgtgctaagtgctttatgtgacatagcctcattcagttctcatatgagcccagtggatggggtcactactatacccactgatgctcagagggttaagtaacttactcaaggtcactcaaaatggaaagaaagaatgatgaactcaatttgaatctcactgctccaaacatggtcaagatggatggttcccaggtcggtctaattcggaagactgttataacttttgtggccacattagcattcttagttcaaagtcctggtggtgccactgtgaacattctcctcctgctacttattgctgtaagcccacttatctttctgaaatcttttcatttccaatttagtttcaggattctcccgtttctctctttcatgctcttggcttcagaaccaacactgtcagagaatagtatctttcctctgaaattggaacactatataataattttcattcatgtttttcattcatcctaaaatagctcatatttttgaaaactagcaaactcgtattagttgtcatatgaaggagcccttactgtgtcctctgttttacttaattaaaaaaaacattaaggtatctagtcttatagttaatgattgggtcaaagtgttaaagacagatccagacacacagcttataattccttggttatttagggaggcagaggacattgtattcacacagtgtattcacgctacatgccaggacctgtgatatctgctttatatatataatttttgaagctacaagaattatttccattttgcagaggagggagtttaggctcaaagagatcaggtgacccactcaatgtcacttgcggagaaactgggatttgaatacaggcctgctcaactccaaagcctagatttactttaccaagaacagctgtgtggaaagtctgtaaggacaaatctgttcccagagtggttctgactttgcaaagaaccacaaatatgaatgccccacctaacgagctgatggtggatagttttctcattactaagttttggaaagcatcaataatcttaaaaagcaaagcagatgaaacagtaattgcacttggggggaaaagtcaaattcatatttctgggacattactaaatgacagcgacttttgagtggctaacccttgggtcacttggctgttatttctctctctaggttactttcttctgataaactttgaacattgaaacatttctcctttattgtcatcatgagggggaatggtttattcagcagcctttcatgggaaagcaatgtaggacttttttttttcttttctatattaggagttccctcccacccaacctcccttatgtggagctgcaatgaccaatctgaagcattctgcaggagagccaagacaggggatgaatcccttacaagagcccaatataagggaatctttttctcttctttggtccaactaagctcctacaataattgccaaagaatgttgagaattgtagcatttaggactgaaaaatttgaggccatattgtgacttctcccatagtataaatataccttcttctgatttctagtaaatagtctgaccaagtctatttatctgctggaaaaccccacagtagagaggtcccacatgttatgggggctacctgttccaacaagtataacatcctcactccaagttgcatagcagagaggttaaaaagcgagattctgcaggaagactgcttaaactcaaaccctggcttcatccattagccctgtacagccattcttcacccttctccatcctctgtttctcagggaggttggactgcaaggactgcatgtgaattgtttcagtggactctcctgccctccagcttccatctggctttggccagtatagagccctggaaggaaaagaaggactggaggaaagtgtgcattggggtatttattcccagacccccttccagcagactgctatggccacagtctcagcttctgtcaagtggccttctgcatgcagaactctcctctgggtcctggtactctccttttggcttaggatgggcaattgttccctactgttagtagcccagggagtctgccctatcccttagagttttcctaccccctcccacacccttctaaatgactcctttattaaacttatcacaatttacttaatttaaatatgccatctttttttttttttaagctgggactccgacaaatacaaccactgactgtataaccttgggcaaattccttaattcctcttggtctcagttttctcctctgtaaaatggtggtttaataatattttctgcagaaggtcatcttaagaatcaaagtacaatatataaggtgcagtacattatgcatataggaattactaaggaaatgctaagctcatataactaccacaaagttctagctcacacactaccttaactcaactatagtaactcacttctgggaacttgggttaagttttcagtcaagaatcaataaggcaaaaaagaaaaaaacccttataatcaaaattcattttaaaaaatcccttacatcacctatcagaatatggtacagttgattttcttgtatccagtcctgcagagtagttcttattgacattgaagtttgagaacccatcagctagacttaagaaaggtaaatctatatgtaaatgtcagtcttctgcttttgccatgactatggggtccctagaggagactgagagatgccagcaaattccaaagtgttcatgcagcttgtggggtcggccttgttctgttcttcttccaaggttctgtcaacttattgccggctaagagacttgtagtttgccgtgcagattaaaaggagaccctggggtcacacggtaggtagggaggctaggttctcaagacagctcagctgtaaattacactgggtgaatgctgctgttcccatgtgtctaggatggttctctattgagcatgaaaaagatgtaagcatttcccacatattctatttaatcatcacaacaaccctgatgatgatcattattatcttctccagtttggggatgaggaagctaagatcctgtgcccagaataaggtaacacagagtctaatacttggcggggatagtatttaaggcaggattgtctgacccagagctgagtttttattcggcatggtcacgtggttgtacagtagctaacccctaatgctctgtgagtgcacaacataagaagaaaactctatgtttttgtagctgctcacattggttacctagaataacatacaagtgtttgtttgcctggaaagttttttattccctgtatttaaaggcaagaggatcagccctgtattctagcaatttctttctgaaggctaaatgtaccatgctccaactacttcttggggccctgtttccagacccttctctatgttgttgaaccacttctagtccagcacttcccaactctggctgcgcagtggactcaatcacctggggaagtcctttaaaaatgcccaagtcagcccccgcctaaccccaaagatgcatggaccagaaatctctgaaaggtggcctgagtattactattttctaaaaggctctctcagaccattttaatgggcacccagtgttgaaaataactgctccagtttgttaaaaaataattggtgtgaatattggcaaaagccctctggcacaaagaaagagaaccagtttcttctagctaatgtttgttagccagaattatctgtggcatagtccatgtgacttaatagacctggtcttccagggcagctgaatgcaaatgtttctcacgtgtagaacgggatgtcagggcttacagagaaagtgggaaactggaatgatgactccatctaattcggccatgctggatgattcacctggattctctcatgtcctgagcattgaaaacataatgaagagtttttaaattgaatgtttaaaagagtgaaaacaactccatccctttttctgtttccttttaccttgtatttatgtaccaccaggtaccttgctcttggcagtgagcgtgaatgaatggcacagctcagcccctgaagcctgtgtgcagagattgagggattgtgatggagtagttcattcatgctcatgttaaggggggtgctaatagcagactagtgctcctgcgattattaatatctaggtctgggacagattgtgatggcttcttttccagttgccacctcagcagaaagggaaatagaaaaccctaacttgtaaagttagacaattagactgtaaagtttgtatatgtgacaacttcagatacaaagacacacacttacccttgacggggcttaagaggagagtgtcaaacataataccaaagtgaaagaagatagctcttcatctacaaattatttttaaacacatttaccaggttaaacaataactaatttttcggaagagaagagtacccaaagtcaaatgccctaagacgaagagatgcttatggcatttttttttaaataaagaaaatgcaaagttagagtggttctgaaggaacctaggatgaataaggtacagacatgattattctaatggtgcagacaggattgagagagaaggggggaggggagagatggagaaaggcatggatggaagatgacgtttggattcagattttggaaaggagagtaaaggaaggaggtaagcagagatttattttttaaattttattaatgtgttttcccctctttttcttgttatttttctcatctgtctgttcatacttggatattttgtccaataaactatcttctaaggactctgaaaatgcactgaatatttttggagggtttactgggtgccagacgccactttaggagttttacatatcctctccatttcatttagttctcttagcacagagaagtgggagaagatagtcccattttacaggtgggatgaagagagagatggaggaatttgccccaggttactcagctagaaggtggtgaagaactcaagccttcggatatcagcgcctggcatttaactaccaatcggtcctgctgggactccggctcctctggcaccatccccgggacctactcagagagtttgcacgtggccggtcgcgttccatcgtctaacaaggtccagcacagcgcaaatccgaagatcgtctaccccggggaaaaagagagtctgtttaattctcctgtggccctccaagtgagttcttttgggttccattgcctagacgaggaaagtgaggctttgcctgctctgcgctcacagggtcggcaagtagtgggaccctaggttcctgcagtattccagagataatcaaagctgcacaggtctcgtcatttttatgcaaaggcgtccggaaggctcgaactctcccttgcacaagcccatctgtctctgtgcgccgcccccgggacacggaagcaggcggcgagcagcgccgagtgggtggagaaccgtcccccgccactcacccctcggccaactctccgcgccttctcagccggcacccacgaggccgacctctctcggcctaaaaaaaaaaaaaaaaaatcccggcctcccctgcaccccgcccgccgcccccagggagctgcattaatattaatctcgctgaataattgaaggccagagatttattcgagcttcggcgggggagggagcgcagctgggccgcgtttaggctgcaccacccgcgtgtttcagccgctcgactccgctggacctgggacccccagacgtgggaggatggggtgggtgtgcctgcctgtgagtttgggggtgagtgtgagctgaagcgggtgctccggggagtgaggagggagcgccaggggctgctccagggaggcggagacggaggggcatcccgggtctccgcgcggtcgcctgcgcttcaccccgcacggggtgacctggggccacgcgggcttcaggggaaacaatagctactccttagatcctgggctcctgccaccggctgcccaagccttcccggacgagcggcggggcctcttttcttatttggctaatttatggcgagaggctggggggagggatggcagaggagggaccgcgactggcagatgggggcggggggcggcggttaaaggagttgcccgaggcggcggcgcgggtgatgtcagctctcgacgaaaatagagagggatcgcctgcaaatccccagctccggcggggctaaaccttgcaatccctccctggccggcgccgagccagagcgcagcggcctccaccgcctccccaggcgcgcacacacccgcacacgcgcacgcacgctcaccgtcctctgccaccactctctgctcccgccactcgccgcgcccgcgagccccgcagcaaagcacaggtggcagcggctgcaggggcgcatcgccggcgtgcgccctcctgcagccctgggcgcatcgctctctcggggaagccaccctcggagcccccggagctccccgccaagcgccatccccgcgggcggaggggagcgcgggtcgcgcgccgtggagagccgggacgcggattagcgcccgcaggagcctcctgcgcccgttgaggcgctaaagggcttaccccggaggcgggtggaagggcgggcagaggctcctcttaaataccgctcccggccgcacttcgcgctcaccccggcgtccgctttctccctcgcccacagctgccggatagtgctgaagaggagggggcgttccccagaccatggcatctacggaagggtgaggggatttttatctgtacccgcgggaaagcggggtcacgcgcggggtggtggcgcccctatccgggatgcggatagagaggcggcggcggcgggcctcggaggtggtggcggagccgtagcttggctggggatgggatggtggggaggggattgattttctttcctggagattgctgcttaatcctttgaaaatgcgagaggtggagggttgttttattttgataaaaagggtaaggtgcgctgggggcctgagagtgtgaggaagaaatcctcttgaggttacttttgggatttcaaaacaataggggattgggcatagtgtgagcagacaccggggtagcagcgcctggagcgcggcgccccaggcccgaggcgggcttgcaggtggtgccggctcggaaggaatgagccaagacagggccctggggcggggcaaggaccagcgcgcgcggccttgaacgccaggtttgcagagtcgccatggagatgctgggcccgctccgatcggtccttgtccctggaaggcggaatctccctggctagctctaaggaagggtggaagagatttgggtgcttcccgggaggcgggaaaacgtgtggtttgggacaagggcaggagtcgccagactccagcgggcagggatagcattggcttccctattcagcccgaggatctggagtcgtgtcctgcctcccaagattccagctggcatggggaaagctccctcgcagtgataactaaagacaattgtctttagcaagagacagaaggggctgcagggggcaaaaggattctttgaatactcacacatcaaaggaaaggtccacagagtccttggaccagtatctcccagaaaactttttgggcttcgtagaacctgagtggcaatgaaaagactgggcagctcagccctttggttaattcccaaaattgcagttactcacttgcaagcgatcacaaaatccatgttatgtgaaaagcaaatatcaggggcttctctgggctcaagtggtggtgttggcattttccagtttctcctaagaaattttaccaactccgcaggcttgttttaggggaatggatctctaaacaggctgaagagctggtatccaaagccagatctctagactgcaatctccaatagaaggaaaatatttctagaactgtctctctgtccaggagaaggaattcattcattttctgtcccccagagtccttccaaaggcatctggcatcttgtcattgcatgaaattttgtctctccctttgccctattttgcagtttagacttttttgattattatttctccaaaaagatgtttcaggaagacacctgtgtacaaggagggtggtaccttgtgctaaaacagatctctagaaatagatactaggagcccatatggatcaagatcagtgtcttaccatgtttagttaaaaaggcttttatattagaaaagatatgaaagaatttctggttgccttcatggaccttctagacttatccttgcttgtaaaggctagggtggaaaacatctgtgaaaaagatggatgatattagtcttccaaatcctgcatccagctcactccctattttgatggccagatagagaaggagaggttacaacaacaaccccaaactaagtaagtttatttcacctttgtcctaaatgaaagctgtcaaatgatgtgacattcaatgtagagccaaagtgattttcggcattttagaaagattcccatccaattaatcccatctttctgcactgtttatggttaagaaaagattcatcagaggaacttatatttaagagaagaaagaattgaaaaaagttgaacggctgggaaacaaatataggatctatgacccattattatttaacagcagtaactgatgagcaggtgacattctcagaagccctggtctttcctttcttcttctcttcttttcttgcaggagcatttactgagcacttgttgagtggaactcacatgtgaggaactccgagttggggggatacagaaatagtctgggatttgccttttagaagtctagctccatccagtcaaggatttttattagtaaattgttcacgtggactcatgagatctcttgcaacttctaacatctttggttaatgtgccttgtaaagaaaaatttactaagactcctcaggctgtctcctttgttagcttttgccctctaacaatattgaaattgtttccttgaaacatacattactgagaaggaagcaaaaatagcaatatagttatatgctttcaatttatatattttcagttcaactttgtttgatccagaatgtttggggaataggataatatgggaaactgaccattctggttcacatttatttggtgatgtaattatcagccgcagaacatgttaattaccaatttctaaagaattattagaagcaataatgacatcttatgtttgtttaacacttcactttcaaagctcattcgtgtacctcatcacatttgattcttccagtaactctgtgaagtaggcagtccaacaaaaatagactttaaggataaaattatatatagggaataccatcttttcagaaagattccaagacttggcaaagctttggggttatcatctgaaaatgatgtgtgctgggcatggctggtgcagattactggctttctctcaaacttttggcatacctatcctgcaaattgccttttaggatattctctttgtaacctgtgcattgatctttgcctgtacagagcatatgccaccacagtctggttttttgagggctttgattatttggaattgagattattagcatccagtttctataaaaatcaatagtggactctttggtagttcccaggctctgagaggtattttcctgcaaagcaaggtctaatttaatagttgagcattcttttttctgagtcccctgtcatggctagaattacggagatggcttttaggtccctgacccaaattggaaagagattataagtagttggtggcagccaggctagtgtccattactgactgggtcacagtggagtgtccagatgctgaagaggcaggcattttagaaatatcttcttggaggtggggggtggctaggtcactctgtatgtcagagacccacggcaatctgtcttctgatcagctcccaggagccaagggtcaggggaaagccagccatgagggcttgggcttcagtttgacttaaagagcaagggaaacagaaaactgctgacagtggaaaaaccctggcaagggagaccccttgaatttattatttcaagcaaataaaagcaaaccataaccattgtcctcttgcttctccccttgggaatgaatttgaggtcagcaggaggaagaccctacagcgtggacttattggaaagtgagtgaaggatgtggggcttatggtctagaggggtttgcaggttgcatgcctcaggcttggctggaattttcatttctcattttcaataatatagaaatcagcctccttggggaaaatagatattagtagagctatgagaaaaccatttcatgtttactaagacagtcgcttgtgagtaattgaaagcttaattctcaggaaataatttctaaatccagatgaaacttgtgaggcagaaactccatgttattaaaaaccaaaagacaaatctgttcatcagtatcaatggccacttcttttcctcttccatgcaacacaattaggtgttttgtgtctcctttggctttggctttaaaggatgtgtcagacaaggaaaagtccttaagtgatgatgcttcagctgcaaaaaacgagcaatatatttaacagctaagtgtgagatttctgggtcagtgtgccataaatcctacagttccagaattgcaaagctttttcatgatttgaagctcaacacagagtgatttcaatgtaaatcctcccctccctgccctcctccatggctgtgtcacacaatgccctgatgtctggtttccccccttttaaaggcaaactgaattgtttctcatattgaatttttctcccattggactggcttgcctcttggcatgagctgaaactattcttcatttcagtcgcctgctacaattattttaatctactaaaacactgatagtattaaatcttctaggaatagtaggcagaagcattattctgaagataaaattttagttttgcttgcatttaaagaacttgtcttcgcagtctgaagaaacatctaacaaacaccagacactgccttgcttgcagcttttgatttcatgcccttaacagcttgttgggggccaggcaggatgcttcatagaaagggttttagaatccagattatggcaaatctctttatttaccacgatcatgagcttgctctctcctccctctgcccgcccctcaccccgcaactctccaagtgccaactccttggaacgaattaattaaaggaatgtttaaaaatatctctttgctccatcttcaagtgctccatcattgactggaggcagatgggccacatatttgtcggtagaatagaaaaggactagcatctcattataaatctgtctggttggctttaaatgatgtcagaaaagacaatgggcccgcagtattaaaggagaatgaaaggaagatctttaaaattttaaaaagaagacccattttcttagtgctctggtttttcttttaaaaagtattgtttctcaatggtgttgatatttatttatttttcattcatgtatttaatgtctcacttagataaacagatatgaccactgttggctgaactgctgtttggtgtttttggcaatctcgacagttgctttagaatatggactcactgagcaagaattgtcctttgaaaatggaatgaagggaatgaactcgatttgatggctagacttgatctgtgtcaatcctggtctctaggatagatgatggcaatgttaaagaccttgaatgatgtttggggtcaaggagggagatgctgtccccatgcccccctctattttagaggcttcacttaaatcactgagagtactttcttctcttacgtttggtcaggagggccatctgtcacttgctgtttgtaatctggcacaggactttctgtcatgtggttctgccatcccaagttcccagccactgtgctgtcaggatcacagagctggtgacgaagttggaagtgaatctgagacctgtctgcctcccgctttgcctttttcccagcactggacatgaggtactgggtgcctgtggactgtatgtggcccatgggtatattcttataggctcacagaggattttgaacatgttttaattgttcacctatacttacttttaccttaaaaaaaatcctgattctggcttctcttaaaaattgggagatctgatgacaaagaaccttcccttttatcttggtaccatttattgagtgattatatcccagttggctttaaacagtttaatgtgtatcaatttatttaatccccacaacaatatgatgcagcaggagtgactcttagcctcattttacaggtatagaaactgaggcacagaaagagtaggtgaattgcccaagattttacagccagtgagtggcaaagctaggctttcaaaccaagcatcctggctctgggatccatgcctgtagttactaggccatacctcttagtccagcagggcaggggttaactggggctgaggaatggccatctcctgagatagggcatatgcctttcaggttgggcacagtctgttctgagactacttttctcatgttacctgcctgaccccttacctttccaaggaagttattgagagattgaaagcgtgcgtaccattctcttggtatacaccattgcctagtggttttggatttgaagaattattcaaaatctcatttctatgtaaaaaaaaagatctttcaagctacctttccccccaccccccaaagcacttcttgttattttctttaactttggtctgggttgtacataatggagaggtcttttgtaattattggtttggtagtcaggaagccaatagcgttgtctggtctagaggcagtgctttgaaagagcccagggcatgaccacatgggtcccaacctttgggatattgaattgagccttgggtatgtgctttgtagtggcaaatgtagctgagcttatagcaggccctggaatttatgttttcttttgcagccttcaggtgtggctgtttagggttgcgacttaacttacgctctttactgaaacagcgactggtcttgtccctctaggagtggggctgatatttatttcatagcagatgcaaacagtgatgagctaaggatgccttttgaattgaggaagaaatctttcagaggcgtatttctgtgttttaaagagtgggacagtttgctcatcacccaacagatggcagtaaatgtcagcactttgtccacactggtggtctgactccctttggaagcccttcaatccttagggaatcccaattcccatggcatttcattctcttttgattataaaagctttctccaccaagtatagaatttggtaagagtgaggcaattgacatatatctacagtgttccatatcaccataaacaaatataaataggatcagccaagcttatgtggctatatatatatgacttcatttcatccttgaaaatcccctagggaatattatctcattttagagatgaaaaaactggaacttagagaagttttgattttatgctgttactgagtttttaggttttttttgtcatctaattgtactgtgttttgtattatccatattttgcaattaatccacatttccttaaaatttcatggatccttcctttgctttttatttttgttttgttttttttttttgctccagtaagtgtcttcaataatttcattcaaagaaagcaagataacctagtgtctctgaagaaaaaataatgtaagaatcttaaattcttaaagaatcttaaagaatttaagaggcaatgccttaagaaggacagcaactattacagaaagaagttattctttgagtggagatgtgccattcaaaagaaaatgtcaccataaaaaagtgagaataagtttagttaattgaaaatgattgtcaaacctatttgtagatgtcaaacaagataatttcaaatggaagaagtagtagtacatgaagggagataggtaaaagaaaacagagaaaagaagaaaatcattcttctctcttagatatcatggaaagctaactgctgcagattgtgtttaatctcaatctttacttaaaaggacagttgggctgggcatagtggtgtgcacctgtagtcctagctattcgggaggctgaggcgagaggatctcttgagcgtgggagttgggggctgcagtgagctagctataacaatgcctgtgaataaccactacacttcaacctgggcaacatagcaagatcctgtctctaaaaaaattaattaagaaagaacagttggaatctgatagatttcttaggaaagtggatggacatcaacatgaacaaaacccaattaaacaaacttgttcaagagtgaaatggatggttatcaaccaacaacacacatctcagacattctaaagtggctgatggtacctggggaattggttcagctatcattttttctatttatatgcaacatatggtctagaaaaggtgtgaagaataaatattgggctaatttctaagaatagattagagagtaatggaattatagactgaatctattttcccaggatttttctggaactcaatcccatcaatcagcagatatttataaaatcatcatagaatcttagcatttgaaggattattgatttttaggtcataattaattgctaacatttcaaatgtagaactcattatctattagtctgagagcattgaactttagattcttttcacaggtattgatacactggggttgaggtgtcattggttggtcccaggaagcagattctgagatggagacttgtgtgcatggaatttattgggaggagctttcagcgtaaatccttatgaaggaatgagggaagccagggtaggcagagggagaggttgaaacagtcgcaccaaagcctgcccacccacaaggagctctggaacagggatggcccttcagaatgatcctgaattgaggaaagagatttggcctttctactcctgcattaaccagccattgaatggggctgtgctggaacgggacatggccctcggtacagggcaaggcttggggttggggggaatatagttaagagctgtcacttatcaacatgcccagcagctgggcaaatgaatcattcagtcctgaatgtggggggaaagggatctgggtagcatgtcacagcatccaccactgtttccaaattcaaatgttagaaagataataaaataatgagtctggttgcttgtgatcagaatatccaggcgtccacaaagctatcatctgtaataaaatgctataccttgctggtcaagtgatacaaaatttcaggtagtcaggaggaataacattaagtgatctattgttcagcatggtgactatagttgacagcaattgactgtgtacttgaaaattgggagaacagtagattttaagtattctcaccaccaaaaaatgataagtatgtaaaataatggatacattaattagcttgatttattttattccacagtgtatgtgtatatcaaagcatcatgttgtataccacaaatacatactattttttttgttagaaataaataaggaactaaataaagctctatcttaaaaaataaaaacctcaaatattacaaaatggcatacagtaaaaaagtaaaagactatctccggccccaatcctgttctccagaaatagtcatttttttttgtctgccctttaagacagggaaagtggattctgatgggcaggctggggagaattcaaggtcatcatcttccttaggtttatttatttgtttatttatttatttgtttttgagacagagccttgctctgtcacttaggctggagtgcagtggcatgatctcggctcactgcagcttccacctcctgggttccagtgattctcctgcctcagcctcttgagtagctgggtttacaggtacgcaccacgatgcctggctaatttttgtatttttagtagagataggatttcaccatattggccaggctggtcttgaactcctgacctcaggtaatccatccgcctaggcctcccaaagtgctgagattataggcgtgaaccaccatgcctagccatcttcctcagctttagctgtgtctcacatagtcaccaagtacataagagagaagcccttctcttcattccagtccttccaagggtgccatgtccaatggaaagatggttatctgaaagtcctgctatagagagagaaattagttacattaatctaatttctatctagagtggtgagtataatggaaggggtcagaaggaataataaataaatatattgggaacaagagtatagctattattgacattttcagtgttgacagcagccattttcacactcctgcaagtgttatttcccatggagtccttacctggggaaaagtgaacaatgaattaggtaaatcctttctggaatatccactgcattgttctgttgattcaagaagtcaggtagtctgtcaacttcaagccaaaggtacgtatatgttgacatttctctgttctattccactggcaaatattaagatatgttcagaggtgaaagaacacttttgtacacacaacccaaggtcttgcaaattatatcttcgtgagtgttttcccttattttcttgcatcagttgactctgctttctgagaccaagacattgattatcattgtgtttgtgtttttatcagcacaacaaattaattccagtgactcaattgtagagcaacagaaggtagagcaagccaaccaaatctcattggaaattgccttgcttttctttccttacctgtttttaatagttacaaatctgttatttaccatggcagatcgatattatgcatatttccagtttatgggtaaagatgtcactgattacattcaatctacatttaggaaatacatttttgcacatagaatgtaacagccaaataaaagagtgtgaatgattcactattcactgtcagataaattatttttaacaaaaacttttacccttttgtcctctggaccagtggctccttccccatcacacaaaaacatggctttattaacaataaaagcaaaacccttaaatatacccggcatacctgaaactgggaataaaaagaggtttaattggacttacagttccacatggctgaggaggcctccgattcatggcgagaggtgaaaggcatttcttacatggcggcagcaagagaaaaatgatgaagaagcaaaagtggaaacccctgataaacccatcagatcttgtgagacttattcactaccacgagaataccatgggaaagactggccccatgattcaattacctccctctgggtccctcccacagcacatgggaattctgggagatacaattcaagttgagatttgggtggggacacagccaaaccatatcaagggggatgaggcactgagactagttagaagatggcagcaatagtttaggtgggagattatgacctgaattaaggtatagaaatgagcataggttaccagattccaaggatatttagaaggacttggtgaccaagtgcaagtaggtgtgagcaggtggaagggcttaaagccatctctcagccttctagattaagcaaatgggggcgaggtaagtgcagaaaaaggaattcaggagagaaattaaatttgaagaagacagtgaatttggttcagcatactggcttagcatttgtggcgagtggaatatcagtagagatgttcactgggcagttagagtcatgacaggccggggcctttatggagtgctatttgtattacagatgtaagggagctcacccgcacacagcatgaagctagagaaaagaactgggctaagagaagcatcctgggaagctctagtatctgaagatgggcagagggaggtgattcacggggtgcggggtgcagggtgctgagaagtaaggaagggagtcaagagtgagcaggtgacttgaagtggccgacagtgctgcatgctatggagaggtcaaatcgtggaaggactgaaaagtactcattggattagtcaatttcaaggccatcattggcctttgccagagctgggtcagcaaagtgatggcagctgttgccatgttggtgtgggttgagaatgggtggagagaaaatgaatgcaaattatttttttccataaatggtagtcaagaggtagatggtactaggaaagcagataaggcaagagcaggattatatgttgggttgttttagttttaggccaggtgtgctataagcctgttcatctgctaagggaagggcttgattaatgaagaggaggtcttgaattatccgtggaagatactgatgaaggaaagagttagaacctgaggctaattcattgctcactttgggggttcctgcaggaagagcagggtgcctctgtgagactgatcccacagtataggggagcactactcagaagggacagggaggaaatggctgcctgcctagatggtcaagtccacatgatcaaccctggtcatctgtagagtgacagatggggcagccagcttgtccttacttctatagcctcattagtcagcaagctagagttggatgtattttagtagtgcttgctgttttttttttttttaagatttaccttttaagtcctttctaagtctccctagttggaattcttctctttcttcccttaacccttcatcatttatgctcttgcatagtttgtgaaaattttattggacccagttttaatcccaatctcctcttgggctctgcattccctttaaatcacttcctggatatttgcatagcacatgtatcctgataactcccaaatgtatgtttctatttcaggccttttttctaggttctagattcatatatcctacaacctaactgatgtctccatttgtgcaatgcatagatgtctggaaattatcatagtacaatggaactcttgatttttttttccctacaaactcatctgtacccactcccaagtttccccatctcagtaaattctatctgtttagagattcaaagccagaaatgttggtattaaccctgccttttttttcttccttcagcctcaacctacaagcttactaatttctacctcagttcctcagatatcccacggtcttgcccacatttgcattctcttttccagaaccactttctaccctaccaccattccacagatgactggcaccctctgatcctggagcatgctttggtcctcagcttgaataatatttcccagagaggccttctcttcccattccacctaaaataggtctctctttcctagtcctacctcattccccttgtttgcttccttcactgcatcaattacaacttttacatattttatttatctgtctgtttgtatctacaaagtaagcactttgaagactagttcatcatcatgtcctcctagatcctaatgcagtgcactcagtaagcatttgttggctgaattctcatccttgtcagcctggagaaggagggaaggcttctcagaagaggtgatgtttgagttgtgcctcttccagggagtctgtccttattacactttgttcagacctctctcatagcaactcatcataacagagtgtgctaagtgttttcttgtctgtctgttcactatcctggtatctctctgaggatcagggttacattaatttctttgtgcctcatcttattatcattatcacgatgaatgttagtataattgaattgtctacctcgcaaaagagatatgcaagggcatagagacgacagaagggaacaggtgtgggaggcaacagatccaaggttgagaaaacatttccttttgcttgttgggtcatggtcatcttggtaaggttctggtggtcaattgaacatccccattcctgcctaccagtcaataattaccctttgctaggggttaatagggttcaaggaggttacaagaataatcagttgggaagcagctcatcttgtgaagccaaaaatgtatttgtcacagtcattcatgtccccatgcagctgtctgggaaaattacaaactcctgtatctgcagttcttttaaaatgcaatgaaatttcatcagaaaagaatctttgagcccatcctctgtctttcccaggatgcctgcctcctctcagaatcatgtctgtctattcctttccattgttctttgtaaaggaaaacaaggagaagctagaatgaatttgatattcagatacaaagaaggaatttcttaagtcaaagcagatttttcaattacattagttaaaaaaaaaaaaaaaatccagggcttgaaaactgatttagaaaaagaaaagttaccagaagcagacaacgttgttgttaaattgatcttttaactattaaagagacacttagtatgtttaatcagtctcaatagagttcccttactctggttttgtatgggtctagaaataataccttgtagttggtatgtgtgttttccagcaacctaaataaaaatgttagctattcttatatttcctgaaatggagttcttttctggagttttctggtgactggacatgttgggagatatttattgcatcctggtgggataagagaagaaaaaccatggctggcatcttctttcttgactctgcgagtcctcacagtgcgagtcctgtgattggatgaaagatcagtttataaaatccccttcctgagccttatgggaaagtcttcagctgaagctatcctcatcatccttatggaaaatgctagaatcctcctagattcagagccagggcactcaaactgctgtttttgaagtgaaagtagagtcaaagccgagatgctgggttttctcgtctgctctgacagggaagccattgttagttgcgagaaccaagcatatacagatttcatttttactttatttgctttctctctccctctgaagactgtcaatggggttcaaggcaagtaaactctagatctcaacacaaaattcacacgtgattgtccagtggtcagacagaccgggaacaatttgcccagcagggagcactgtggagccacacctctgaaccatggtgattttcctgctgctttgaaggaagagcgagagggcaaattacctctttcccaggccccgcaccagctgttgtcttggtttccaagaagggaagcccaaccactttgtttacattccaagtgacctggagtaacaaccggggaccagctctctggaggccaaggctacacctgggacaactggctgaggttgaaagtgagttgacagcagttgccattcaccagcgggtcctgggtcctcgtcctcatccttgtctttgtcctcttggcttcccctgggagtcatcagcggggttcgaacaagatttgctggttccggagcttgggtatgttcagcctggttttttctgggttattgaaaaatgttttaaggtgaatggggcaaccctgggttagaagggaggccttaaaagcaggaagcctagacactcaagggattgaaaaaacatttggaaagggttggaaaggccccaaaatcaacaacacaagaatggaggcatgaaaacaggtatttcttttcaaaatgacttaccagccacccccaaagtctagcttttaacccaatgggaagcaagcaacaaaattaaaataggtgtgaaaacgttgtgtttttggtaaagggcacactgccttaggaggcgcccgtggaggagcagagactgatccacgtgtccatatgtttgcttagagaggactttccctctttgcctttgagctaagctgctgagccaagccagcaagatgaagatgttcccttgcttttagggaacaggaaaatcaggattctgtccagctgtggctctagtttctggttagggggcattaaattaatccttgagtttctcatgtcataagatcacaggatatttgttgaataaataaatgcatgcagccgaagagctcactggatgagttctttacctcaagaatttctggtttctccttcaagacaatcttagattatttgggcataaacataggaaccctgggaagcaggacctgctttatggatatgcgacttaggcagtccacggtttaatgctctgctcttatcatcttgaaatgtttaatttgaacaaggggtctcaagatttcattttgcccaaattacgtgcagacccacacattatgtagccagtcctacagggcagccacacatgtgcaggcttgcatgaaatcctcttaccagtgacagtgaacatggtaaagatgacagatgaccttgagacaatctgccttctggcagtgcactagaatattctcataaggagatactttcataaaacagcttctgagccagtgttgcacagcagttaagaagacgtgttttatactcagaaagacctaggcaaaaattcctgttccaccactcagtagctgtgtgactttggggaagttaattagcctctctgagactcagattctttatcttttaaataaggacaatatcacccacctgatagggttttggaatggatgaaagcaggatgtgtgtgaagcgttcggcatagtgcctgggacctggaagatacctataatgttgattgtcattgttcttcttggaatagcagtactgtgttacttttagtctgttgagcttagatggggttatccatcagtctcttgactttgcaaattaggctgctaacacttggtgcatacccaaaggtatgtttgctaattcttttccatagagccacaggtgataagattagaaagtaggccctgggcttctttgatcatttgagtgctgtatttgctctagcgaagggttgtttgaagatttttctcttatgtgcttttaatccataactgtttttacttccaacacttctaactccaaatgcgtggtgtctttcccgacaccaggcaggtgtcctgcaagtcagttcagttctgatgctatccacctgggctatggctatcctacagattgagggctcagtcccatgaggttgccttcacttcaggtgtcagtcacaagtcccaggttgtctctggtacttctgactgacaggctgtaatttctaatttcagggggtttccacaacaccctcctcaagttcaataattccctagagcagcttacagaacacaaggaaacattttactgatatttaccagtttattataaaggatacaactcagaaacagccaagtgaaagagatgcatagggcaaggtatcagggaagggctcggagctttcatgcctctctgggtgggccaccctcccagcacctggatgtgttcaccaacctgaagtttttcagaccccattgttcagggatttttatggagggtacattattaggtatgattgattaaatcattgaccattggtgattaacacaatctccagcccctctcccctccctggaatttggtgggtggcactgaaagttctaatccttagtctttctggtgagcagtccccatcctgaagctatctaggggcccccagccactggtcatctcattcgcacaccaaagtcacccaaaggttttagctatgtgccagcaacttgggacaaagaccaaatatttattttttattgtatcacaaccctctaatatcaaagtctccccaagcaacgagtgcctgactttccactcattcattcattcattcattcacaaactttctaaaaatataactgattgtttcaggtgatgttgggtgggggcacaggaagtaaaagatatttcaagcctaggacaggcagccactaggcaggagcatcatagagggcccgagccttggaagtagggggtggactggatgactgttgtttcctttaacactgagggtctacccccaccaatatggcgctttaaggtttccaacactttaaagcatctggaaggccaagatgagtttgagaaacatgtgacagaatgttacaatcagcaggtgagtaggtacgtggataaagggaatccatgtggtgtagaaaaaaaatgctcatctctgaaataaaacattaaaaaaatagtatgcagctaggacgtgtaaaccaaaaataaaattctaagctccccaagcaacggagtggacccctcctctcacccaagggcattctaaagcaaacctgaaacgctggtttaggccatgatgaggatgggtggttgaacatttctcattataccctccttcctttggaattcaggtacagctgactagcattaacattaaaagagaccttaagactgacaaaaaagactctttgtagcaataagatatcaacatgacggataacaggccctgaaagaaatcaaagtgttttaccctcaaatatattttcaacatattttgaaatgccctgcaaaagctgtctcttgtggggaaaatctcccttctgtagaaaatcctgttccttttccaggtctttttttctgatccaggagagaactaagagtctgacacatttttaagtctgataagaaacacttacagtccattctctctgaagcctgctacctggagacttaatctgcataataaggaccttggtccccacaaccccttatcttaacccagacactcccttctattgattccaggtctttaaataaactttttcaaccaattaccaatcagaaaatccttgaacctacctatcacatagaagccccgcccacccacctccttgcttccagttgtcctgccttttggaaccaaaccgatgtgcatcttacatgtattgattgatgttttatgtctccccaaaatgtataaagtgtgtaaacaaacaaagccatagcccaacccccttgggcacatgttctcaggatctcctggggttatgtcacgggccatagtcactcgtatttggctcagaataaatcttttcaaatattttacagagtttgacacttttcaccagtaaacactaaaagacttctatttgattatttttcaggagaatcaagtagttagacttaaaaaaaagttatccctctagaaattttcatgggattgatttttcatggatatacctataatatatgtggctggagtaaaccatattaaggcagcattctgtaaggatggagagtttatccataacgaatttattcatcatagatgaaatctatactaattagacacaagcatgatcttcaaaaactccacaatacttatctcactaaccaggaataaatgcctttaacattggtatattttatttcagatgcatgtacacatgtcaatacattttttatagtgggagcataacctacagatttttgcaacctacaatttttacttagcaatgtgttgtgaatgtatgttaataagtgaatctataaacttgtttaacggctgtatatagttttcattttttggaggtaccatgacttttacaaactatctcctattgttggatatttagcttgtttctaatttttcactattataaacgttttgcatgtacacctatgctgacctgtctcactatttcttagggtaggttgctagaagggaaatcactgggtcaaatggcacacatactcattattttgacacatgctgccaattagccagtgtctgaaggggcaggagattctccaatgcagttgtctttttgagtcccccttaccgctatgtctcttacttgcagttgtgatatcaaatggctctggggttgactttgaattcctcattacatggcaaaatcttcagccaggtttaggctaaacaaaaatctttcttctgtatttggtgagctttttgttcctaggttggctgtttatagctccctaatctttgacatcccacatcaccctatgttgaaattgtcattttaaaaatgtaaactgtagcacattctctaatttctttctgtaattgtgcagagttcacattgtatttctaagaactttgctttcttctactgagtactttctctaaaatggtggctcccgactttattcagggctggtttcttctttttggccctgcagatggaaagagctgaatatcccctctattttgagtaggaatagatgattgaatactccgcatacaaatggaaaacgcatcatctatctgcaggcatcatgattaccaggtttgattctcatgttcgtaactatcttgtctcaagacccaccattgcctcctccttctcctagctctacctcctgctgtggctctccagattttgtatttacattctatgatggttcttcatttatataacaaagtgtgatggagaacaggaaatcttttagagaaatcaatcagggaaaatcatacaaaatggcttcattatctgggtaagtcaagctcaagctgtttataattagagtacttaactatgcttgctttagtgtcccatgagccttaggaggcagttgcaggaggctaagtgttggtgaagaccaactcttgacttccttagggataaagagggactaaattgggaggacagcagggtaggggcaagaggaagaggaaagaagagtaggaagtccatgtgaaaggcaaccgtgggtaggcttgctttttccagactggtaggaacagattccaaaccaaacatttttattttgtgagtaactggcaggctgatgcaaataaactctctcaaatgaagtgtctcctagaatccctaatgacccagccataggcagcttatgcagggtttagtgtattatccttccttcccattcaggaagctgctgaaacaccctctgcttattctcatgtatttcacagcaccagagctgagtaaatggagtggaggctaagcctcctcacattgcccctctgacgcagttgggcagcggtacgactttctattcctggataaactgtggaccccaaatatgtatttgagtagcctttacttaacacaatatgctgttgctgtaggctttgtatcctatgaatggaccatttcctagtagtgcttcaagtttgggctgtgtttccttgatcaaactcaggccatatatatttttttctttccaacttttattttaggtccaaggggtacatgtccaggtttgttacatggataaattgcatgtcacaggggtttggtatacaggttatttcatcatgcagttaataagcatagtacctgatacgtagttttgtgatattcaccctcctcccaccctccaccctcaagtagaccccagtgtctgttgttctcttctttgtgtccatatgtcctcaatgtttagctctctcttatgagtgagaacatgtggtgtttggttttcagttcctgcctaaagttgcttaggataatggcctccagatgtatccatgttgctgcaagggacatgatttcattcctttttatggctgcatggtattctgtggtgtatatgtaccacattttctttatccacttcaccattgatgggcatctaggtcaattccatgtcagatcatattttttttctatccccttcaaaagtgagaggggccagtgcatgtgaagtttggaaatgagagccaagtaggtttacatgtctcgtgaggcacaatatgattctctacttgtcatcactgtggatggactcaggatgttccagtccccttgttatcctgaggaccacagtcaaagcatgttgagaaacccaggttttagccctgcctgtgctgctggctgctggaccagcaatccttctgtcatatctcacaatatgctttgtgagttttaaagactgggagaaagaagaaaatggagttcactcatgtctttgtttgggttggtgtcacacaattccataaactgggtggcttaaaaataacagaagtttatttctcatagttgtggagcctgggaagtctaagatcggggtgctggcagatttggtgtctagtgagtgcccacttcctcatagatggtgccctctcactgtgtcctgacctggtggaaggggtgaggggtctctcttggggctcttttataagggctctaattccattcatgagggctccacctgcctgacctaatcacctcccaaaaactcacctccaaataccatcaccatgggggtgaggatttcaacataagaagtttggagggtaatgcctaggttttcttctagggtttttatggttttaggtctaacgtttaaatctttaatccatcttgaattgatttttgtataaggtgtaaggaagggatccagtttcagctttctacatatggctagccagttttcccagcaccatttattaaatagggaatcctttccccattgcttgtttttctcaggtttgtcaaagatcagatagttgtaggtatgcggcgttatttctgagggctctgttctgttccattgatctatatctctgttttggtaccagtaccatgctgttttggttactgtagccttgtagtatagtttgaagtcaggtagcgtgatgcctccggctttgttcttttggcttaggattgacttggcgatgtgggctgttttttggttccatatgaactttaaagtagttttttccaattctgtgaagaaagtcattggtagcttgatggggatggcattgaatctgtaaattaccttgggcagtatggccattttcacaatattgattcttcctacccatgagcatggaatgttcttccatttgtttgtatcctcttttatttctttgagcagtggtttgtagttctccttgaagaggtccttcacatcccttgtaagttggattcctaggtattttattctctttgaagcaattgtgaatgggagttcactcatgatttggctctctgtttgtgtgttgttggtgtataagaatgcttgtgatttttgcacattgattttgtatcctgagactttgctgaagttgcttatcagcttaaggagattttgggctgagacaatggggttttaccattcaggacataggcatgggcaaggacttcatgtccaaaacaccaaaagcaatggcaacaaaagaaaaaattgacaaatgggatctaattaaaataaagagcttctgcacagcaaaagaaactaccatcagagtgaacaggcaacctaaaaaatgggagaaaattttcccaacctactcatctgacaaagggctaatatccagaatctacaatgaactcaaacaaatttacaagaaaaaaacaaacaaccccatcaaaaagtgggcgaaggacatgaacagacacttctcaaaagaagacatttatgcagccaaaaaacacatgaaaaaatgctcatcatcactggccatcagagaaatgcaaatcaaaaccactatgagataccatctcacaccagttagaatggcaatcattaaaaagtcaggaaacaacaggtgctggagaggatgtggagaaacaggaacacttttacactgttggtgggactgtaaactagttcaaccattgtggaagtcagtgtggcgattcctcagggatctagaactagaaataccatttgacccagccatcccattactgggtatatacccaaatgactataaatcatgctgctataaagacacatgcacacgtatgtttattgcagcattattcacaatagcaaagacttggaaccaacccaaatgtccaacaatgatagactggattaagaaaatgtggcacatatacaacatggaatactatgcagccataaaaaatgatgagttcacgtcctttgtagggacatggatgaaattggaaatcatcattctcagtaatctatcgcaagaacaaaaaaccaaacaccgcatattctcactcataggtgggaattgaacaatgagatcacatggacacaggaaggggaatatcacactctggggactgttgtggggtggggggaggggggagggatagcattgggagatatacctaatgctagatgacgagttagtgggtgcagcgcaccagcacggcacatgtatacatatgtaactaacctgcacaatgtgcacatgtaccctaaaacttaaagtataattaaaaaaaaaaaaaaaagaagtttggagggacacaaacattcagtccgtagcagcccacctagcgtctaagactgtggctcaggtatattcggagctttgcttcttcccacccagtatggaagctttaggagacttgcctgctgcctgctttacctgtgtttgtcacctccccatgggcctctccttccgggtgctggctatgctggggtcttggggtctcttaccttcccttgactttgtgctgctcccttggacagtctttagtggaggggtgatgtgggaagagctacacttccctttgctctcctgtcccttaattccccagagcttcacacatacaatgactttatcaaagattaaaaagagagggagagagagaaccttaaaaatagctattctcagaagttaagagaaaaaaaaaaaacactcctaaacttttgacaggaagtcacctgagagattagctctgtgttggtgcatggcttgaggtctgtcctcctcagagtaagtgctcctctttcagtcctccacggggcaaactcccactcctgtccacagtggatccccactgccctccctactcagggagagcccattgttgttcattggggggtgttcctgaagtctgagttaatcactatggatagcatggccaggagcaccagtggggaagacgctctcctcgggggtctctgggatcctttgagcattgacccacgcttagcacacagggcatacagatctccgaggacacttgccttccagacctaccaaggagagaaatgcttttctagaaggcaacatacctgcagctgtattctctgtctgccacagaagaacagttgtctttattgtgccttgacctttcctcatctttcagcttccatgtcgtgcccaacggcttaacagtacaacagaaatgggactcagcacccagtactgtgcctctccaagcctccaggccatttggcactggccactcccactgactaggtcagacctacaggtttgcttacctggggttccatcccatccttaactggtgggatggtggccttgcagctgactaggagaaactgaaggtggtacaatggagtgaattctctaggaaacagaaggggtcagcctacttggcctgttttggctgggtcatttggtcgtttttctaaaggccaaagttcatgctcttttgaccaaagttagggatttttttttcatcaggggagttaaatgagctatttgcacttccatatttttgaaaagcggcctttcactccagcaggctcaggctgccaaattggtgtgtccccccatctgtggacaccaacatcacagccacccagagcaatggggcagatcccggtggtgactgagcagcaggttgaggctttggagacccgttttgatgtgtctttgatccctccacacgtggctgaaggcacgtgggagacagagtgtggacctcaggcctttgctgcaacatcatgagaaaaccaggactcccctgctgcctgtagctggtgggtgggtaggaggagtttacttaaaaaaaaagttagaccctagggttggggctggggtttgttcaagggctggggcaaaaggaggtgatagaaaggagggagcttgaaaattgccaagggaggaaggaagggctcagttgaacagatcagtctttttcctttaggaggggactggagaatgctccatcatggttacagaagagcttcaagggccgtgggaccttctttagccattctcaccagcagaaagccacagggaagaagaggaaaagggtgaaagaagcccagagtgataaaagggagtctctattctctcccattctttaaaaccagagcattttgagcaaaccaccattaagacacttgctttattgatttttataaatttttatttggctattttggggatggggggagacaaaaatcactgaaggaaatgttcaaagctgggaggaaaagtggttggtgacttttttcccacatttgtaaaacatcctttcacattttgtctgaatgcctattgcccgttgccaaatcctaattcaattaaaggtttagcaatgaacaccagtttagaattgttttgccatctctgctcaggacaataggcagtggaaagaagtgaagaggggggtgtcagatgccacacactgggggatatgggtgctatgggtcacctgcagccatctagctttaaaatgaccggggaagagcctcctgcattcactgtggggagaagtcaggagctgggctggcctgtgtcttcaaagtggcagctttagaaatcaggagagtctcctgggaccagctcaagctgcaataaaatgcggtgccattcatgcattaaacagatccttacagagaggctgctgctctgctaggcgttaaggacagccctctggaagacagatacagccacatctggcagctgcatggaggccagcagcccgagaccctgggtgatgatgcatcttgggcttctgccacctgctagcaccacactctgacccaaaccttcacatgggacacctggcaccaagaaggaggatagagatgtttgaatctaggaccagatacttactggattaatgacttggcctctcagagcttcaggttcctcatagactcccaccataaagtaggtatgatagcacctatcttggacggttgtaacgatagtcatctgtcatttgaccagtgctggaacatataggtatataggtgcttggaaaaaggtggctattttgaaatattctatgatttaagccctggtgtgcttaatacccccctgaaacacctaaagttgagacttcaagatgtataaaaccttccaaatagattcatgccacatttatccaccctccctctccaagcatacacatgcactgctgaatcttccagaaggggaggtcctaagggtgccaagcctgaacagatactgggaggaggactcggggcattccctccagacagttttcccaagaccctccactgccattgggaaaaagagtgtgggaaccccgggagtcttaatttaggcagccaaagggtgggccttgggagctccagctctctcagatttctggtctggcaagatggagtatgaataagaaactcagtaagcatttaactgctgattgactctgggaattcccaatagtattcgcaatagagaaggcaggtccccttcccccaaatgtcagaagccggcttcctccgcctactcctggtgacttccaccgccctggacacatgggggcgctgcagccctacttttgctggatgccctccccgtccgagtcctgaaagaccctgattttcctctgtatctgggtgagttcacattctctgtgtcttcctatgtagaaatcagcgaaagctcagcaatgtacttagaaaataaaaccaaaaatgtgcaccttaaaccaggaaacaaaaacttacgcaagcaatgcatttttttaattgtacaaacacttaaaagtatgtgtaagcaaaaagaattccaaataccctgtgagaataatattcaaaacacacacacacacgtgcacaaacacatggaatgggacgataagggtgatttttatttatttatcaagataaggtatcattctgcaaactattttgttattagctttttcacttaaaaatagccctgcttgcaagcaggctctgtggtgcaatggatagcgcattggacttctagcctaaatcaagagattcaaaaatagccctgctaaatatttgcaatctttcctacgctcctttttcccccaaagtgactttggatatccagagttaccaaatctagtatttgaagtccttaggtttgagggttgaaagtgaaaggcaagctgttttaatgaaaattcctaactgaagagagcggagacttaagatgcttaaattttggtcacacctgagcggtatttgtttgcatggcagttagaaggcaggtaatttgtcctaaaactaaaacagcagttaacaacctttaaattccctgaggagatcccttcttccccaaccaaacctgttcccatttccttctagactggttgacggtcaggtgggctgattggttctccctgctacagtggtagaattcagcgctgtacctaggtaagaagggttttggagggtgtatgggaaggtacacacagggtagagatgatagcacaggctttgtggtcagactggcaatggttcaaatcccagctctgtgacttcttgcccaggtgggtggcctcaggcaaattacttaatcgcccagagcctcattggtaaaacagggtcataaaactctcacagaattgtgactggcagattataagcacccaatgctcttttaggggttcacaaagtttttctgcaaagagccagatagtgcatattgtaggctttgtgagccatacagtctgtatcataatgagtcaactctgccattgcatcacaaaagcagccacggacagtatgtaaataagcgagcaaggctgtgttccaataaaagtttatttacaaaaatagatggcaagctggatttgacctgtggaccatggttgactgaccctgctcgtgatcatccccatccaacagaaatatagcagaggccacagatagaatactagattttcttgtagccacactataaaaggaaagagaaacaggtgaaattagttttaagaatagattttatgcccgggcgtggtggctcacacctgtaagctcagcaccatcggaggccgaggcgggcagatcacttgaggtcaggagttccagaccagcctggccaacatggagaaaccctttctctactaaaaatacaaaaattagctgggtgtgggggctgatgcctgtactcccagctactttggagactgaggcaggagaatcgcttgaaccagggaggcggaagttgcagtgagccaagattgtgccattgcactccagcctgggtgataagagtgaaactccatctcaagaaaaaaaaaaaaaaaaagaatagattttacttacctcaatatatccaagttatgattgcttcaacatgtaactaatatgaaaaattccttaatgagatggtacattttattttttggtaatattttcaaactctgctggtattttaaacttatgacacatctcattttgcactggtcacatttcgagtggtcagtaaaacgtaacctcaatattgcttctcaaactgcaggccaaaaccaatttagtgggtcaagaaagcaacttacttaaaaaaaatcaaattttaaaaatgaaatggaggagaatagaaactatcagggtacactacatgtaggaaggacatgggtcgtttcttgtactttggtgtgtgaatgcctgtgtgtgcacgtgcctgtgtgtgggtgtgcgctgagacatcatgagaaaaagaagacatctatttcttactgtagattgcacacagacatgtttgaaactcattactgtacgtgctaaagtcaagtgggttttttgtttgtgtttttgtcttttagagcaggctaactggggtgtttagctagtgcttcacacaggctgtgctgttgaccgaataaacatccaaaaccagctaaaccagttgctaaatgtcatagtgaccatttaaaaatacaaatcaaagtttcaaactttaaactttattatctctattcttagctttaaagcatgctcattttacagatagcaaacagaaatccggaaaagtgaaatacttaagaccccaaaaccttggctgggcccagtgtctcatgcttgtaatccaacactctgggaggctgaggtgggaggatcacttgaacccaggagtttgagaccagcctgggcaatatagcaagacctggtgtctacaagaaaatttaagaacaaaaaagaggctgggcatggtagctcatgcctgtaatctcagcactttgggaggctgagatgggtggatcacctgagttcaggagttcaagaccagcctggacaacatggtgaactctgtctctactaaaaatacaaaaattagccagacatagtggctcgtgcctgtaatcccagctactccggaggctgaggcaggagaatcgcttgaacccgggaggcagaggttgcagtgagccacgatcatgccattgcactccagccagggtgacaagagtgaagctctgtctcaccaaaagaaaaataataataagaagaagaagaaggagaaggagaagaagaagaaaatactaatagttaaaaacaaaacaaaaaaaagaccaaaaacctgagaagtagttttggaacgagaatgaggaactctgtgaactcagccttgagctccttcctcacctgctgggctctctacctgggcatgtgaatgggaaactgggccaattcacccagtgatttaagcattgagtcatttttttgcttggaatatttgaatatatgaaataaaagttaaagaggtattgctttaaagcacttcattctcttattgattcttttattgactcttccacaaatattttttttccctcagtttttggtcatctacatatttaggtttttaaaaaattaaattagttttgtactcaggggtacatgtgcatgtttgttacgtgggtatattgcatactggtggggactggacttctagtgtacccgttacccaaatagtgaacatcgcatcaaataggtaattattcaaccctcactcccagccccttttggagtccccggtgtttattatttcatctctatgtccacgtgtacccagtgattagctaccacttataagtgacaacatgtgatatttggttttgtgcttctgaattagttcatttagggtaattccacctgctcatgctttctgagcatccgaaggtgtatcctgctgggaaacaaatgtgaaggaggcataggctctacatgctcacaatctggggtagggtgttatctttcaataaaaacatgtctgagtggggcatggtggctcatgcctgtaatcccagcactttgggaggccgaggcgggaggatcacttgagtccaagagtttaagaccagcctgggcaacatagggagactttgtctctataaaaaatacaaaaatttaaacaggcatgggaggcacacacctgtagtcccagctacttggagattggggcaggaggatggcttgagcctgggaggtcaaggttgcagtgagctgtgatcacaccactgtactccagtctgggcaacagagtgagaccctgtgtcaaaacaaaacaaaacaaaaacaaacatgtctgagattatttcgaatgctataaaaaagagtttgtttcatctggtatgtagtgccgtaaaagatgaaaatgtgaaactgatgaaactcacttttcctccctgctctttagcaatgggatgaaagacattttaaataaatctatgactcatcgggtctttctcttttcagtaaaaattatttaaggcctattttctggaaataaattctgggtaaaccctactcccctaatgggatcccatttcttcctttccccgagggttgatacgtagaatgaacacagtctttggattcaggcagacttgggtataaattctgcctctaccacttcaagactatgaggcttaggccatgttctctaagactcagcttccccatccataaaatgagtatgataacgctgacctcataaggttgtagtaacgattagttgcaagaatatatgttaattaagaaaaaagttcaagtgtgaaaaatgcttttatatatgaatttttggtatgaataagttttcatcacatagctaattgagtctagaaatgattttgtttgtttttgtttttttttgtcacttcctcctccttccagaaaggtgcagtgggaagctgagaaaggcattttggttcccttattttaaggtcctgatgcttaatggcttaccgactgcatttttaagatattgtttccctacccattcatatctctgtcttatacatgtatggtttctgtcagtaattcaacattcacaaaaaaatggcccagacattattttaaaaaagaacaaaaaacaaataggccttgcagttgttaccatggcaaccaaatactttcctgtcatttattcagaagtgaattattaatgagctttgtctgggacatagtcagaaaacacacccgttactctccaggggaaggtaatatggcttctgtagcaagcaaggtcacagtgtggaaaagtaggggatgttcttgcctcctcatccagtgtggggaagacccaaatgagccagccatttacatgggagcctcctcagtggccagagaccccacgtttctggcattttgggattgcataaaaagctgggcccctctctgagtcacttttctagaagcagcatcttgaactggcatttcttcccccacccaccccagaatgatttgacccatttcttcttaggtaattctctcccacacattaaggcagccatcttcagtgattgattgaccaggatcaagtacatataccaattctacaggagaatgggggtgaggggaggtgccagaagatgggaaagtcagaaggtctatttttgcagattactgggtgtggtggatacctgtaatcccagcactttgggaggctgaggcaagaggattgcttgattctagaagttcaagaccagcctgggcaacatagcaagactccatctctacaacaaataaaaaagggggaaaaaagatgtaaatttttgccccttgttcttttttaaaaatgaaaaagcactgcaggttagtcaccaagcttctcagacaaggtaattttaaggaatgtatttaagctttctaagtcccagtttccatgtttgtaaaatgggtttaatagtaggaccacattatttaggggtggttgtgaggataaatgcataggaactatatgaagaagttcctgacacacattaagccccttagtatgttagctattgcttttaaaatgatttatccctaaaccatatatcaatattgcttgaaggttgaatcacctgaaatttgttatgatttcaaaatacaaccttttaaactgatgggttttttgaattttcaaaaataaaaattgatgttcttttgatttctttcaaaagaagatgcttgaaatagccatctgagtagtaacatattgatgccttttcatcggcacctttcttcagttgattgttgatgtacactgacatccctgaatttcattacagcagtgactgagggtgtcaacgtctacaggtatctggaaaccatatttattttaaatgacatctttttttttctggcacaataaaagagtgaggaatgagagaagacaagataggcctaagaatttagatattccatggaaaaaacaaacctgagagtgtgaaagaaatatagcagggaacatggttaaggttcagagaaaagaaaactgtcattatttttattttattttattttatttattttatttttttgagatggagtcttgctctgtcgcccaggctggagtgcagtggcgccatctcggctcactgcaagctccgcctcccgggttcaccccattctcctgcctcagcctcctgagtagctgggactacaggcatccgccaccatgcccggctaattttttgtattttagtagagacggggtttcaccatgttagccaggatggtctagatctcctgacctcgtgatccacccgccttggcctcctaaagtgctgggattacaggcttgagccaccgcgccgggccaactgtcattatttttaaagcttcactgtgttccttgctcctgtgtcctttgtctaaattcttctaactttgatgagccaaattctacacatagtttcacccagagaacctgcaggctcaagaaaaaaatactattataataatatatgatgatataagattggttagaagatgctaaggagaatccaagcaatcagagaaaaataaaaccaagctccctgtctttgatatagcacatcttggggaaagatcaagtcagaaaagcagatggccggcctggctcattgtggaattggtattctgagataacttacaggtcccaaaccatgtcgctgtaaggtgttctgagaaagaacatttgactgctacccagacccctctgcaggttcttctgtttagggagaatgggaggcaaaacactacaaaacctgtaggctttagaaatagacagactagctgtgtgaccttggggaaattgcctaacttctctgagcctcagtttgctcacctggtaaaagggagataatatttccctttcagggttgtgatgaggatgaaatggaaaaaccatctgatatgtgcttgtcatagattatcaacagctgttacctctcttctatgtactgaaaaagccatctgttaccctaattcataaaaaggaggggagggcagggatggtttgagcttggacattttctggcctttctcaatgacaatttagaatgcagtgaggggaaagcttttatttttgaatatttctatttcactgtctcactgggtcactctggggcctctagaaattgtattctccagatatagtatgatgttgtcagcatatgcatacatttttatcacttctttagtttatctttgtataaaccacatatatctgggaaatttaaccaactgcctttctacaagtggtgtcatatttaggcagatggttactttttgggtacacaattgtgtagggaagccatcttgcactgagactctgagaccatgggcttcccagccttagcatcttacttactgtcacctctctaggctttagaggggttgattattgggtttctaaaatccttctaaatttcccaaattctatggttcaaagtctttgtgtaactgtccaatagaacaagcatataagtggccaaacttctgtgatgatactcctttcccctaaagccagtgaatcttctgaacattcagaaattgggatactggtgaatatgccacagtggaaatgcataggtaacttcaacaagcaaataatcttcaatgatgaatcaatatcttctaatccactgagcctaaagctgcaactgtttgagattcattaaggattcttaaatctaacatgtatttgtcattttgaattatggccatatgctttgcagatggcctctgagtgggtcttccttattcaagaaggagtagggtcacattcattatttgtacattacttttttaaagattcatgggattaaaggatgaaatcagaactcagacaatccaggagcaacctgcgtggatgagaatagtcatcttccatattccacatgggatctgtactttcagttaaaatatttatataattatggtatcattaaaaaagtcatttccagatctcactgacttcgttgatgaatcacccactcaccggtttaagttacatgtgacaagacagcttctattactattttgtttcttgttcttggattccatgagatatctatacttagcaatatgatactctcctcttttatttgcactagggtgaacgtatttctctttcaagcaaccaaaaaagtcctggctggaacagaggaggcgatggcaggccattgctaaactttgctgtgttgtggcagtacagtttctgtcccttttatcttgttaactgtcagtactccaaacaagcgagtagaacaattgccatccgttcagcatgaagaaccccatggaagggatctagagggagatgtcacaccatagatgtactgagtgagatggtatcatggtggccattcctcaaaatatcagcactgccctccagaatccacccagatgacattgatcaagcatctactgtaagccagacacttggagaggtgctgggaatacagagatgagaaagacagggtatttgctcttgggtggttcattccataatgatagcaacaacttatatagaacctgttctatgccaggcattgttttaaatgcttcatgtatgttagcttgtgtgatcttcagaacaaccccatgaggtgggaactattcttaccatccctgttttatagacagggaaactgaaacacagagaatctgggtaacttgccctagttacatagctagtgaggagcagaaccagaatccaaacctaagcagtcagctccagagttgggctccccactggcacattctgcttgtactctccttttctctgataatcccatgacatctttatctccttaagccatatagcattttcttaggcttatttctttcataataaccattataaaaataacaacaacaaaaaatactttcaaccaaaaaaggcagaaaaaaggcaacacaacataacaaaattaatttacccaggtcccattactgttgtcattttagtttatgtcctttaaatttgtgtcaaactaacatagtattttcaggcatgcttttttcttttaggattatgccagagtttccccactatattcttttttgacataacttttaatacactaccagtttgagtgttttccagtcatggctacactatacaattgacttaactgatcccttactcttggacatgcctaaaattcctctgtcataacactgttgtgaacatctttgcatatgtatttttttctatatgtctgataattttcttagatggtgtaggcttttaacttttggagcgtgcaggtaggaaaagcaggatcagttttcagattcagattcaaaagaaacatttaagcttttttcactcctagagagctggaaacaataataccttaaaggtctaaagcatgatctagatcattcacctaccctttaggaggacttttttttttttttgagactgagtctcgctctgttgcccaagctggagtgcagtggcgtgatcgcagctcactgcaacctctgcctcctgggttcaagtgattctcctgcctcagcctcccatgtagctggggctacaggcacctgccaccacgcccagctaatttttgtatttttagtagagacagggtttcaccatgttggccaggctgggcttgaactcctgagctcaagtgatccacccacctcggcctcccaaagtgctgggattataggcgtgagccaccgcacccagccttaggaggaatgttaaaacttatgctttgtccttttggaaatatcatgtatcttcttcctatgaaatggattcatgatgttccattataagttagctaaacaaagatttcactggtctagttgcccctgtggcccatcttgaagaatcactctatggaatgatgggcaatcaaacacaagaggatcaggaagaaacaaaataggtttaacagaatctctgtaatagtgaaaatatcgacaggttgacaaggaccacagggaaagcacagtatgaaacaaatggtaagtaaaggtccaacaagtggtgggtgattcagtgaagagacagcaatgcagagtggttaccacgggccttgtaggaacatggagctgagtttgatttcatttcttagtttctgtgtcatcttgcacaagttgttccatttttctaagcctcagtatcttcatctgtaaaatgggcatgttatcatacctgcttcataaggttgttgtgggaatctaaccaatcatgtaagtacagatatagttactgtttgttggctttgtgcagggtactgtatttttacaatttcatcatcattttcttcattgtcacttcactcagtggaaggggactatgtgataagagatcagtactcattgttgcagaacatgaaatcatcatagttgtgtgtttctgggaaagacaataaattaaaaggtgcaatatgacacttacaagaaatacgtactcccctttgttttcctgaagtacaaagtaggatcaggttggaatttcccgcctgtcttctgaggcaaacaagagcagtttgggggcctcgctgagggggctggtgtcctctgaaccagcagggtaggcatgagtggacaggctgtggcttgtacttcagtgtccctctgatgtttttaaaaattgacagctattgaagatttttcgggctgttcttggtgggactcaaactcaaagagaaagaaggggtgatctttatgggtaaggtaactgggatgtctagggattcagcaggctttggatacagcagacagagggctgaaaggctatctagactttgctactctccccatcttttggttgggttttcttctgggttgttgtcctttcaggcaatgatgggtttggcagctcaagacttacagcatcctcagagaaaatgatttcagcaatggaaagtgcctcttttctgatacttctaggaagaggcccagagaagagtctcattggctgggcttcagccacacccattcttgggctgaccactgtaggaaaggattgctctgattgcccagtctggatcaccgtgtgatgacaatcacacgatgggatgacatggaaaaggtggctgcccaaaaagctgcccgaatgatgaaaataagagaaaagaaacaaagggatgaaaggaggaaaatatatgtggctactgcaaactcttaaaaaaatctcataattgagtaacttatacctgagctctgtaatacttcactccaacttagtttgtcaaggagttttcttttcttttccttctcttttcttctacctccatccccactacgtgtaattttgtcagatgttgtcttctattgcctgaaactttagcagtcgctgtgaatcctgtttctttaagcccagggtgtcactgggagcataacagtcatccagtgcagctcagcttctccctacagattctaaaaatacccagaggcactcaaaacaaacagcgaagcactgaggcactgcccgtgcagacacccacacactcccctctttaaactgccttagcgctgtcactatagggagaatcagcaactcacgcagcccttttatttatttattttgtttttatttatatacctctttatgcagaagagatgaggggttcctgatggaacagaattgattggaagaaagggaaagagggagacaaacagcaaaagtgtttgcactgtctttttgcagctcgctgtagacctgaactaagatgtatcgagagatcagaccaatccagggagtcgcacagattagctgggatttaaaataaaactctttaacaagagatcacctagaataactcgcacatatgcatccatgaagaggcccaaggaccacatttggagaaggttagtgctcacaatgaccagggctacaacctggcttatttttcagaagcaaagcaaaagccaaggccttttccatggaatctttaggtggagtcgaaccacccagagcatcagggtgttcttatgtcaaggaggtgtttcatttcacaggactgcagagctgagggtattggcattgcatgctgtgcatctacagtttgggaacttgcttaatgttgattgtcttatcaaaccagtgagctcttgggtttttcaaaagcaggctgagggattaaatgataaaatcagatggattatgaaaatatgagaatcatgggaattataacaggtatgaccttttatagattgcctgggacaatcaggtgtctgcttaacataatgaacctgacccggtatcagcgtgcaagtaaagtctttgcagtcggtggttaaatggagtttattaaatattgttagtgataatcatggaaaggagaatttaaaatggccatagcttctaaccaactctggggatgtctggatgacatttgttttggctgttgggattcgccacgtaagtaattgattgcccagaagttgttctcagatcaagctttcaattggccggtttatggcaggatcctgggatttaaattaaaaagtgaagccttaaggataagcataagtaagttcttgggacagaatgtgcttagcattgtttccatccataagtgagtggaggaagcctgcgtgccccggacatatgcttttcactgggaaaggcgatcaaatgtctctcttcctctctccctagactgattctcatggagagtccttggcatgttctcaagcctgaagcaaaggcttctaagctcccaaattgctaggtgatctctcccgaggaatatgtccgaggcacaggtgccatgttctttgtgggtgggagtttgcttacccaggattttatgtctggcttaaaaaaaagtctgtattgcctattgaaattgcattgtctaaatgtggcaaaggatttgcaatagttttgtgaatcagggcagtctaaaaattttattagtaataacagtagcagcagcaataacaaaggctggcatttacatagacttcctatgtgccgggcactgccctctgtgtcacaatttttctttttttttgagacagagttttgctcttgttgcccaggctagagtgcaatggcatgatctcgtctcactgcaacctccacctcccagcttcaagcgatactcctgccttagcctcctgagtagctgggattacagtcatgtcaccaccacgcctggctacttttgtatttttagtagacatggggtttctccatgttggccaggctggtctcgaactcctgacctcaggtgatccatccccctcggcctcccaaagtgctgggattacaggcatgagtcactgcgcctggccatgtgtcacaaattttaatgcatttaattcacagacaatggagcttcagacttacccctccatcttctccttccccttccatgagctacatttagccgcattggctatgcatccttgccaatctggccaggtattgccaactttaactgcatccttatagacaactattcatagagcttaactgaagagaaccacgggttatatattagtctggagacactcttgcctgtcacactcttgttgcttttgtgagcagtaagttcaaggcacaagacttatcaatccaattgagagcttcagttacaggcagacttattttttcaccctgtccttcttgtctccaatgcattggaaaggttcttaatcttatactaggtggttcttagttttcatgaaaattttcagttattcctaaagacacaaattgctgatgtgaataagggtgagcgctttcagagataaagatgctaacaaatcagtgcaggtttgtgacaattttaaactgcttcagaccagctggcatcaatattttttcttggtatttcttctgtttttgatgaacgatgtctactatgcagccacaagctaatactgctgtcttcccaggaggcagggccctggtgtcttgggtatcatcacccaaacaacgtttcagaataatcagtccctaaagtaatgctttgcaaaggcatcaagccactgtgatttgagcctgggctttaggatctgggggttctgcctttttctaaatttgcatattgcttttcccgttcagaatttggagttagtaactgtggaagggcttttgggatgggaggcagtggtggtgctgattatgtttccaagtgtaaaaccaatcagctgggtttggatttctgggagcttgtgtggttctgtatggctttattcttctggctgaaactactaaaggaacctccaagttcctgcacaatgttgcttccatttgccatgtgcaagtatttttatttatcaatggccagttagtgaaataggttgtgaatctgtgtttcttaaagaaaagccaacactgggataaagaaaaagaatgcttgcaattttctagataagctagaacatgtcagtatgtaaaatgagaaaacaaaacaaaaacgtttctttctgttcagggtctgaattatctggatttgacaaatacgacaggcaaagtcaatggaataatcagcatgaatatgcctattcaggcctatctttgcagcttactttttaggggttgttgggaggttcctttcttggtatctacttgatgattttttttcatcttgcgagtcttccttggaaatagaatgaatgaagagagcacagacctcggccatcagggatgtgtgggcttaagttctgacatagccacttagctctctggtgctggacaagttccttagcctttctgagcctcagttatctcacgaaaatagagttgatcatcatccccctttggtaacgaacagatggaatgacgggtgtagagcatctgttacacagtgcatgctctgtggcattcatctggctgacctgcagcccactctctgagttgagaacaaaccagggatgatttgacagagatagccagtccaatattggttgaaacaagaaagtttgaaaaggaaaaagatgcctacagtctcttgagacacgtggtttccattctctatcccaactttactgctgacttgctgtacatccttgggaagttgcttaacccctctgaccttcaatttcctgatctgtgagatgggaataatattaatggctccttcctcctaaggatgtagtgagcgctaaatgagttaatggggatagagtgtttacgtcagtgccccgcacattggaaggggggacatacacctatttctgctttaccattctgcctgtcagccattctgatcttcatgaagacacttggcctgctcattcctcagtggttatagtaccagctgcatttctggaagctcactgctggctacaaaatgaccttcaacctccaagtgatccaggcttttcctagcagcttccatcaatgtgcaggggttgaggaaatttgtcgaatagcgacattgaggatatgagtcaaagagagggggagatgatagattcatatcttgaagcatgtggaagtaatctggtttttgtttttgcttttttttctgaagcagatccaggtgtctaaatgtaaccattgccggcttaaaaaaaattattattcacaattgaaaacagatataatgttaaatcaagatgagtaattattcacatacataagtggaaacaggataatttggttacaattataaagataaacatgttggtttttaacccaagaatggcagtggctttgatccttttttcatttacattttttgtcttttgaaaatttttaaaaatttcagacaattttagacttatagaagaattggaaaaataatacatagagttcccacattctcctccctcagcttcctttaatggtatcgtacgtattacataaccatagagcattgatcgaaactaagaaattaactttgcaacaattgctagaatttacttggatttcatatttttccagtaatgttctctctctgttctaggatccaatccaggtcctgcactgcatttagttgtcatgtctctgtagcttcctcccatctgagatagttcctcggtctttccatgtcttttcatgatcttgacactttcaaagagggtttttttttttttaatagaatacctctcaatctgggattgtctaatattttctccatttctagcttttaattgactgcactaaacatactttactgtttaggccaaggatccagtgacaaataggagtttttaagcctaatagattgtctagatatttctgagactagcctggctggttattactgatactggaggttaggagtatggactgtggagccagacagcctggattccgcttctggctctgtgacttacctgctgtgtgactttgcaaatgttacttgacttctctgtgccttgatgtcctagtctaccaattggggataataatagaatcaattcttagggtcacggtgaagatcaagtagaagtatgaagtgtgtagaacagtttttcacaggtggtgatcactcagtctgtcttagcttttaccattgctcaccctcctctgtagccctcctcatcccagtccaggcccagtgacctgctgatgccactgcccgggtctgcaagtacttgtgtggctctgaccagagtgacgactttgcagcaaggacctggggtttttagacatggttctcgtggcccaactgaaatagccaccttgactggagggcccaaagcttggatgctactaccacacgggggttccatctccagggcctcctgctgtgctcagctcaccagccacccacatcctgcaacctgcacctgcagtcgtgagatctactcagaaatggccccaggcccgcttcttctactctgctttactgaccactttgttctgggggtttttgtcctctcacctgtgtctcctctcttccccttgttcctctgaattcacgtgaagcggggaaccacaatgataacacattcagcttctctggaaggactgactgggtttgcttctcagccataattcaacttcaatctgggcttcaatgtcttggtatctaaaagaggatgatcgtagtaataataagtatcattaaatgtaatgaggttttattctctgcagggcactactttattatttttattttttattttttgttatacaatttttatctgaaaaatccatgttacacaaatagtcatacagtaagtcctcacttaatgtgtaaaataggttcttgaaaactgcggtttttaaaaagtgaaacaatgttgctatatgccattcaaataccttttgtttgtatcaattaaactatggtaaaatttgttttcttaagcaatatgttgcttcacttacagttacagcttccaagaacctgtcaacattaagaactgactatacacatgtacgatttatataggtatgtgtatgtgtatcaccttacacatttatatatatagatatatcttaatgacacagtgccagcaggctccctactaagtataagacaaaattataagataatagttattaaaaaataatagatggcttaatatttgcttagcaatgttctaagctcattaatgacacaggacatttaaaaaatctagaaggtgagtagatacttttaaccagtggtgtccaaccaaccctttgaatgagaggacttttttgcttatctgtggtacaaatatcatgaaaactatacacaaaccctttttctttttagctcatcagctatcattagtgttagtgtattttatgtgtggcccaagacaatgtttcttcttccaatatggccggggaagtcaaaaggttggacactcgttctttaaatttggggtttggctactgtctcatctatcttcaaattgtaggtctcttttctttgctccagacaggtgaccagatctagggaggccaggtctctgtaattctccaacaacacatcgctatttaaattctgctgggcagggtccaggcatttccactcttctggagagaattctgtggccacatccctgaatgttaagagttccatttctcagcttcgggagtgtcttggagtcttagctataaatcattcaaagccagcaagtcacagagcgagggaggctgtggtagaatcacctaggcatcccagagcagaggacacagggcagtgaagccctaacctgcagggcactactttaaatgtcacctctattattttatttaatcttcatcacaaatgtatgacatatctactaacataatcccacttcacagatgaggaagctgagaaacacagagtttaagtaacttgctcaagatcacacagctaagacacggaggagtcagcattcaaactcaacctggctttggagccgacgttcttaggtactacatgtgagggttaaataaggtaatctgcatggagtacttagcaaagtgcctggctcagagttaatactttgaacttgagctatattaatcccatgatctgatttctgtttcctctgcctcctggtgtatatgactctgggatgctgtgttaatcattgacccagtgctctgtatcatggcaatggctccttgcccagttctcagacaagtatgccccttgcccatgctgcattagccctaccacttcctgcccagcagatggggcacccacagcccctcaccttgttgcagcacagcctgcagccctctccctgtttcacatctactcattttctggggtctttcctgcgttcccacttagtttcaccttgtacctcaacctttgtttctgcttctctcacccttgtttctaccttctgctctcacccacagcctgacctcagcccctccctagaccagctgctccccagccctttgcttggttcctgggacctgttgtttggcacagtctaggggcagaagatcatgactggcatccctaccgggtttgtcccattcatgagggggcccaacctggctatggaaacagcagcacttggtcatgggtcttgaggtctgaaagaaggtgttgaatggagaaaggagctgaaagggcagctgctcctgcagaagggacagtgagcaggagcaggggtggccaccatctcacacgcccttgcctcttcctgtgactgggccttgctcctccaggctttatcaagtcaccatctctgagagaaggtgccccagtgccccacacatggctcatgccctgccctggtgtgtcgtgcttctgaaatgtggatccctgggttgtacataggcctgaatctctgatcatgctgtgagcagtgggcagaagccagatgccccagccaggctgcctgggcttgcatcccaaactaccatgtgctaaacaagttcgagcaagttacccaaatcctctgtgcctcagtttccccacctgtaaaatgaagatccttaaaaataccaacctcacaaacttattttaaggattaaatgaattaatctaaatgaagggcttagaatggttcctggtgaaaaatagttattgattataattctaagagttattgattataattacaagaattattgattttaatcattggttgtagattcttactttgagttattgattacaatttattattgtctataagtgctattgattataattataacctactgtaattaccttgatgataattattgctacaataataagttattgattataattcttactatgactgggaacttcttgaggccacccaaagcaccatactcatatttgtggctggtcctttgctaggtccttcctggttattgagaataagtttgcaataatcacctgtgaaactgaggataaatatctcaaataaattgtatggagtgtgtacttgagagatactaaaataacaggaaaagctaataatctagctttgggagttgtcatgtggctaaatgcccagtccccagagccaccaaagcaggggagaggggaccaatacacatggtgacaccataagatagcatagcagaatgaagccatcacctgggtggcgtgatttgttgatgaaggctctgtaagtgaggagggtctggtccagctgaaaaatgagtgaaagatgcatctgatcctaagagacaagagaggccaaggggcagccttgtagtttctctttaccaggcatacttccttcccttgccctctccatcccttctctactttctctccaagtcacctctttgtttactcccttctgtcctacattgcaccccttttggtagttgcagacagtggtgaaggcaccatgactgatgggggagccagctgctgggccagaccccaaggcttcttcatgcattgtccaggagtattagtggctccagaactctcaggctactatcattttgttttgcatttgcttttccaactgaaacaattttagacctgtagcctggttgagtgaatttcaagatcaggtagaatagtgcttcttactgaaactctcatgtgtttaagaatcacctaggattctgatggaaatgtggtttctcattctgcaggtctggttggggcctggggttctgcatttgtatggggctcctaggtgaagtggatggttgcttgggtgcactctgagtagcaagaagtcagcctgttaattcagctaattgtacttctgactgttcagcaaagaaacaaaactgtgaaagtctctcaagtatcgttgcagatgttgcctactcctaaaaacattaaatgaggtcacagagtctccctttgcaaagatctcaaggcatcatgggtgtgttcccacccctggtggtactaagggaaacgaagtcacaggttcaggtttcaattctcaggggacccatcagcttcactttgctccactgttgtagactgcccagtggccattggtcaccaaagtcattgtagttgacagatggtggcagggagatgaagagtgagaacaatcagtaaaacctgagagaggaggttctgagggtccagctggaccatggtggatacttgcctatgtcactaggaagggagggaatgtggattggagccaagttggtgctgtatcaaagtcatgagggaagctcataaacaagaggcaaatgaaacaatgggaaacaaggaaatggggcttgcattcagagtttcaacagtgggtgagacaaagtaggttgctttaggatgaatgaggcaaagggttctcactgagggtagccacctggcctacaggtgctggaccaaagtgaacacagatgagtcaactccacccattgtctctgcaagaaaacagctcaaaactcaccccatgaatgagagaggaagatgccaccctttgggactgtctgtaccctggcagaaatggaatgatttatccaaataagcaaggcaagttttcatatatttcatgtattcttgcatatatcttagccatcttttcttttcctgggccactcagcatgtgcagctcatgttcttcttggcctgggaggtcatggaaattctacctggctgctgcaatgctggggagggatactcagcaatggggatttcactttctgccatccagttcttctttcagacactgcctccagtgagacagcctctcacataagatggaaagatgcacctgctctcattccccgcactgagccctcctctctgctcttagctctgggtgggagctgctctctacctctcatgaaaccagagtacaccttataacactcactctgttctttgggcttctcctccaacccatatgtaccctctgtcaggctgctgagtatttgctaagaccccagtcttcttttctcttggtgaggcacagttgcccaaagtcaccactgtccttgttcacttgagagctgaagtaacttaggtagttatttcagaagagataatttgactccttctttgaggaggcttagcccggcactgacaatgtgccaccactaaaggtacctaggaagaggtggaggaatattctgtggccactcctgcctcatcactttccctaaagagagtgagctctggaatcacataaacctagccccagttcttagaggatcacatgcttgaccttcagcaaggccaagcctgtttcctcaactgaagaatggggcaagtaacactgtatttccacatcaaggtgttgtgcaggttaaattggatgctgtgtataaagcccttgcctggctgatggtttaagtgcattataagtattaacaattattgttactgacaactgtgctacagcctattggagggtcacgtatacttttcccttcatgcctttgcccacactgttctgcctgaatcatcctccctcttcacccccacccaattttgtgagtctggtaagttttactttaccttatcccaaattcttgatttctgacaaccagatactttattcctatatggactgtttcttacttgactggctagggatccttatattatgatttttgttagcattagttatatatttgagttactgccatgctatcctgccccagctcctgcctgaatacatacaccttgtcatctgggctgacgatgatgatcagttcttagagggcaaggtcagctttgtgtcacttgcaaggcagagcttaagaggcagtcaataaaaattcagaataaatgtattgaatcttgaagtagaaattctaagttctttttagggatgtgtatgtggctgtgtcattctctggtaggtgtgacgatctcatgtgtgggacaatgctttggtaagcatcaacaaaatgtcagaccatttagcttctttatccccaaggccccatggctttttatttccaacctccagcatgagtttccattcattctttacatattttgttttgcttcagctggggagtgggagagagcctcaaggcatctggtaaggaacctggagcttggtaagctgattctagtatgaggatggaaacctacaacacaatcagagctcatgagtgatgctgaaatataacttgtaatttttatactgaaagtgttcaatctctcaccttccctcacctcgagttacatgacaaaaggccctctttattacttttgtctctagagcccccagtctctgggaaggtggtgggggaaaaagtctattctgggatgtgttatttttgctgcccacatattatccactccagagcaggacttgatgttttaaaaccagggagaagcctcgggaagggaaagcaagcagcatatgtagtatgagctctcccagacttgtgtttttctataatgttaaagtcttctctctaggcagtgatttgaagtggagcttaattaaaatcaggcaagaagtgtagaaatggaacattaaaaatagaaaggtacaggaatggcactgtccatcccacccctgtcataatgtcagtggcagggctctgcacttcattttgcttctccaagtggtgctagacaagacctctgtcctcatctgctttcctacacaaaatggcatatcccagggtaagctggcatgctttgggggccaaagacgtgtcagggacatcatggctgggcctgaatctaccccagctgatagcttatgtgtatgcaccattgttctctgtatttcagtgtaaggcagctaagcaagcctgcagagctaggaaaaataaaacaggacaacagtaaacatctctgacttaaaatattcatgacaacccttgctgctttttagaacagttgtttagtagagtgggaaaagcaaggctacgtgagcttgatagattactcaactggaccttactttctttatgtgtagaatggatatcaaaatgcctaccatatagatttgatgataatcaataataatgtcagccataattgattgagcatgactgcaggccaagcattttttgaaagtctttaggaggtagggactatgattatccccattttgcagaccaggaaagagaagctcagggaggtttagtgacttttccaaaatcacacagctaggaagtggtaaagcaggactcagacctgcagctgacaagctgtaaattctgtgttgtcagtagctcaaccatacctgagtaaagatccagggaaatcatatagctttactcaaagtgtgaaatgaatgttctgatgaattgaaagatgattttagggggcacatgagatgattgggggtgcattgatgagggattaagttatgtcctatcatggggtgagaaaattattcctttttaaattctttttcaatctttctgagtatgacaaggattaaactttgattaggtggtgctgtgccttcaacaccgtctaatactttttaacctccatttttaacaaacagagcagatagcagaggcttagcagacaataatatctagctagaattcagtaaaaaatggttttatgtcatattcattttcacttccaccctctatttatggcaggtgatactggatttttattgatggtagtgatctaaaattttgtcttagaatacacttactggagtacaaagaatcagtcagtgttcaacactattacagaaataatactagaggtggcgttcacatagggcaaaaatagcggaggctgaacatgaatgactcaagcatgagaaatgctgtgatagcctgtgagcagttttcagctgatggtagcacgtggatcataataaacgtcaaggacagagtgaaggaaaaatgtaactctctcttctgatctcttaataggagaaaagaaatgagctgcttatgaactagatgaaacagtctttcctctgacattttgggtatgaatttagcctgttctgaaggctgatgggtaaagcaggggttcgggaaaatggagtttgctttggtcttcattgaaccatagaagctgagtgctggggacggaacttaagctcaggatcagatcctgtgttagacacatgagggtccagatgcagaaggcatttcccccaaggtcaccctggctgagagcaactgcagtgtgaataattatttcatccatttctgggtcaagttcctcatcttgagtctctttttcccacaacagccaccaggcatgaactggcccatggtaaaacccagatagctcagggtcaaatctaccagttattgtaggtgctcaccaatgccctggcactgcacaaagcaccatgcattacaaagaaactccacaaagagaaggaagtaaacaactgtctccaaactcaaggagatgacagggttatgctatatgatttttacccttagatgagtatcatttgggaggtaagtagcaagtctgctatgatagagtcagttaggaaggtcctcccaggagtgagaagccctgtattagtcagctttgaccaggttctgcttcaataacaaccactcccatgtttcagtgatttccaacaacaaaatttgattttgtgtctgttacacattggttgcagggcaactgcatgcatttactgtaccttcttcacctaggacccgggctgaagcagcagccagggccacacctctcttaaaccagaggggaaaagagcaatagcagaaccatggggaacttcctaatgcttctacttggaagtggcatgtgttacttctgttttgtgttggtttgggttcctaggagcagattttacaacacggcttcaaactcatacagattattagggagatataggaaacatcaatcagggaatggagaaatgagacaaggaaggcagtcaggagaacatgtgttatcaagctagctaccactgtggacaactccagttcagtcccatggagaaattctggaaaacagggcaaatcatgtgccttagaattaccctcctgaggaacaagggagctggtatatttacacaaccaaaccttccagacatgggttgaaggctactcctgaggagttttaatttcctagcacttccagcccgtgtgtacacacagagagtagccttctagcttccgagaaagcactcagacaaagagatagatgctagcagttacaagttggctggagtgcattagagggacagagaggagggacgtgagtggggcactgagagcatctgagacatgctcacatttctttatccaaaggaattcacgtggcaaaggacgtcttcagggatagagaagtgtaatcctcccacagaggtgcagcaatacttgagaaccaaaacaggccctgaaccctgattcataagtataataaactctagttgacacagtacatgtaatagatggttaactgagagctaccatccagaccagggtgttttgacctcagcactattgacatttggggctggctaattctttgccgtggaggactgttttatgcattatagcatgtttagcagcattcctgtcctctacccacttggtgcccatagcctccctcccctcacctcataattgtgacaaccaaacatgtctccaggtgttgccacgtgttcctaggggaaaagtcacccctgtagagagccactgatgtagaccatatatgcattgctaattcccaaggaactgaaataaattgtggatgcctcgatggaggtgtgcacagcctgatgggagagacagacagacagacatataaactgtaatggccagtccaccctgggtaacaacaatttgaattatgtaaagaaaacagaaatagttcaggagtggtaaacatcacttttgttgcaggctggggatggtcagggaagtctttgcagagacagagacagcagagcggggttttaaaggatgaagaggagtttttcggatgagtgatcccacatgtagaagttaatgtttctgcttgaaaatggcatgtgttactttggttctgtgttggtttgggttcctaggagcagattttacgacaaggattcaaactcacaccgtttatgatctttggtgattgtggagacttgggaatgctacactgagactgatgctggaaatgctgacctcagagccaggctgatggcagggctgtagttacaccagctttaccatatcattgatcatgtgtaaggagcaatgtcaagggctttggaggcacttagaggagttgcccaaatggcatggatacaacccagccccagagggaccagaagcacctttgctgtattattttagtcaagggagaaagccagcttattcctcggcctcctcagtatcatctcctgacccatccactttgatgtttgtcccatgtgttgtgcaaacaaaactggatgtggatttgtcacttaacatctctctgcctcagtttcttgacctgttaaacagagatcataaggttttctctcttgctagtttcacagtcttactctaaaacgcattggctgtgcgttcagatgaacctgccctgctctgccatccaccaggtatggacttctttttctccattttctcatctgtaatatgggcttaatacccacctcacagggttgtcttgaggactgaattgtgtgatgtctataagccctcagccctgcacctggcacacacagtaagagaataaatgaccataaatattaagaaataggttgagtgtgcataatgatagctaacttgtattgagtgcaggtgatgttccaggcaccatcatgggggtgtgtatgtattaacctatgactacaataggtatcctgattatctccattttacatatgaagaaactaaggctcagggaaatctgatcacttacctaatgtgtgtagttagtgagtggtattcaaacttcagcagactgttgagcaagtaattgctttgctggattgtttagtgcttggcattttaccatagctctttgaaaagaaaatcaagtctttaggtagatagttacattcaccaaatgattagagccagtgtagctactactgggtaaatgaacttttcttactattgactgaggcccctttagtacacttacagaatattaataagaaagtaggtgagaagaaatgtatttttaatcacagtatctgagctggcttctcagtgtgagtctacatgggtagatgatgaatcaccccaaactgaccctttccagaaatgccttgtgagggcagcacaaaggaaaactttccattgcttaactctccccacagcccccaccctcagctattgaaataaaatgccaagaggctgcttgccagctcctggacaccacctccagaacagcagggagtgtcttctctccctttgtggcagggacacatatggtgttcttagtgtcagagcaagcagactctgttccaagagctgcttttcaatccagcctctgtgcatgggatggcagcaatggaaaacagtgcagggtcctgggtctgagggtcatcctctttctgccggtgcccctgccacctgctaagctcttgtctttggtggaacaggaaataccactcagtgcaggtacagacctagcctgccttgtacacctccgtgtcctggtcctttgtagatgcttgaatgagaaccaatcagtgaggaaaaggtatgatgcccctcctgttcaaaacacctattgagtaccaagtactacacccagatatcattttcttccttctttctttggctcaggtcctagctccagaccttgtcagccacgtgtcctggagcaagttattttctctctctttgcctcatcaagaagatggacataataataattccgtgcagagagttgctggaagaactcagtataaagcaactggctgacagaaagtgctctaagtgctagttcctctgtcattttgagaccaagccagatgtgttagagatgtccctgggggaacttgtatcctggaatttgacagcctggagagatctgaaggcattctctggtcctgtaccccaaatgaggtttgaaaccctccaatgagctccctattttgtaagttacaaaacctttggcaaccgagaagaggcatctgtagcaactttagctgtgtcccaagctccaagccatccgcccttccttccccactaccaggcaacagcctgctgtctgcctcctactcagacatccacggtctggaacaaccccaaaattgtcatctggggcagaatacacaacacccaaaagatggttttgctttctgaacctcacctgcagccactcctggcttctccacttcccatcctttatgacattcatgctgcacacctccccttctctagagagacagtaagcctctccagtgagaggcagggtgtgcaatagtaacatgcattggctcaggagtccgactttgagggtctgccgctgacctgctttgtgaacttcagcaagttgctcagtctctctgtgccttcttcttgtccccaataggaataatagtagtgctacctcatcaggtttttgaaagattcaaacaagccaaatgtgaagcatttagaatgtggctggcacatagtaagtcttcagtgaagattagctagtatcattgtcctaaagtgataaatgtcaccaaaagggggagtagatgctgcaactagaagttggatgtagtcaggctgctaagacatgagacctgaaaatccagtttgctgtggatttgccatggattcccatggcgactctcaaaagcaaagttgctcaaaggccatttaaggctcataaagtcaatggttgttttgcctaagaaatttttgtggaatgaacaaatacaacatagtaaggataatcataatagttaccatatgttgcatgccacattccaggcactttcacatgtattgatggaattaattttcactacagtcccgtgaatagttattattattatcatctgttgtatgaatgaagtatttgaggttcacagatgttagataatctgtccaaggccacacagctcatgagtgttgaaagtaggattggaatctcaggtggtgctccaaaagatgtccactgcaggccacaggattctttattttaacatatttatctatggctgctattaggaaccaactgaagaacagtcctctctcagatgttatatctcctgtgaaaatttcagattgggattgaaatggcccagggaggggccagagacagctatgaaagagccacagatatggtgaggagtgtgtctagatgatccagacacctgcggggattgtgcagagcagagctctgcatcaggccacatgcaaaacatcttgggcatctgctgtctggggtagatggtagtttggagagtcccctggcccgatctccaccattgcctataccaggtgagaactgaagctccattctctgtgctaacctctggtcagattaataattctatatagcagcctgaatcctaccaatatgatgacaaaagtctttaattatttatttatttttgagacagggtctcactgtgtctatcacctaggctagagtgcagtggtgtgaacgtggctcactgcagcctcaacctcccaggctcaagtgatcctctacttcagcccttggagtagctgagactgcaggcaggcatcaccatgcccagttaatttttgtatttttgtggaagacttggttttgccatgttgtccagggtggtcttgaactcctaggctcaaggagtcctcctgcctaggcctcccaaagtgctgagattacaggtgtgagccaccgtacccagctgacaaaagcctttattcctttctaccctaagactaaatccaactctgtggcttagactcagagtcctctgtgttctcacccatttgtcccctcttcttaacctaaaggattgccatgatatgggagattttgatgcctgacaaggggtgggggaagcagaaaggaggagcgagtaacaaaggccttctccagaagtgagggaggccagcctggacacagagggcctgtgtgctatgttagggagcttgatctttatatagaagactattgcttcagagtatgttccttggatcaataaatccatacatctatatagttcttacataagaaaaataaaacaaacaaaaagttaacatgttctgggtaactttgggtatggcttggttaagcaaagttgaatgtttcttcactgcagaatttctcagagcctttaataaactaatgtacattcttagcctccaaaagtgggcagctctgtcaaatctgatttgacccccatcatcttaaaatgcaggagcaggccagtcatggtggctcatgcctataatcccagcattttgcgaggctgaggcaggtgaatcacttgaggtcaggagtttgagaccaccctggccaacatggtgaaaccccatctctactaaacatacaaaaattagttgggcatgctggtgggcacctgtagtcccagctactcaggaggctgagacaggaaaatcacttgagcccgggaggtggacgttgcagtgggccgagattgcaccactgtactccagcgtgggcaacagaatgagactctttctcaaaaaaaaaataataataaataaataaacaaaataaatgcaggaacattttaggtgattagtgttctgagaggcacatctgagaaatggtgttatggtttatggaagccatggaaggtgacatggagactagagtccaaacctacctcaaaacaacagcttgacctttcattttacatttaattagaaaacaaagagaggtccttccacaaaatccaggagtaaattaagctatggaacatttagaatttaagcatcaagaaaagatcagaagctggggcatctctgggccttaaaatgagctagtttcttctacactgggatttagaagttaaagactaatgactttactgggtcagggttaaatgtcaaagagcaagtcttccaaggatgaaatggttaatggtcactggggttggaagggtggtgttagagaagtgaaggtaggcacccagggaaggtcatctggtgtcagagctactgacaggctcaggggcttacccacaggctgctgggataaccaagtagaaattcacaaaacgtgggagggaaacagccatggttcttgcctaaggagagaaaagggacatcaaaggccaaagatgacactgatgatgactttaactcccataattacacaatgtccaaacaaacagtgaccttgggctctcgaaccaaatgacaaaagtcagtaggacagtttgtgacgtctttgtcatcaaaacactgggtaggtaaactttaaagcccccgacagcttttcctctatagtatagcaggactgtgatggaaggcacagctcactccagcactacgtgaccagcacgttcctggagccgagagaatggtcaggtcagaaatcttggatgggttaagggtgggttgtgaggggtgatgagaagggaggaatcagtttgcattcctggagagggaggagaaatgaaaaggcagaaaaataggttattataagacactcatgagagcctattttggtatttggcaaagacacttgcttttcccaggggctgaaataatgtgatttcgctcctgtgaatgagatcttccttaggaacattgaggctcagagaaaggagtaagagttgggaaatataatctgattttcaggaaaaacaattggtttctgaaacatcttaggatgctgaataaaatgcacaggtctctgcatgccagtgcctggcagtgagccaagtacttggtacgctgaatgaattaatgaattaatggaagaaccagagttatttttatctttccacatcaaattattccccttgaaatgactgcttaaataatatattaattacatgatactgatgatgactttactctcatgattacacaacatccaaacaaacagtgaccttgggctcctgagccaaatgacagcagtcgataggacagtttttgatgtctttgaggtcaaaacactggctaggaaaactttaaagcagctgacagctttttctctgcagtatagcaggtaagtggtgacttggaaaagctgtatttttttaaatcaaaatcatcatccatgattggatcttgaagaattgaagaacccaaaagtgtgtgacgcagtccttaatgaatatgtcctctactttcagcctcatgttctttctacaggttctaatgttagtgtcttcagccatcactgtgaagaaattgacacaaatgaaaattcatgaattgcagctctgccatttccctgttgtgtgatagctgtatttccactagcaagtgcaagtggctttaactaagattttattgtcaagcagtttaccctgctgtcaaagtcttgggtccaaagatctaaagtaaaagtgtcagcgatgttgcactgctgcctgtatttggtgggaaaattagcaggtctggcttttgtggtgaaaaaggtattttttaatagtactaaaggcataagatatttggtcccatgttattctctgggtccttgttaagtatttctctttcctcttgcaacgtagagtgtgggtgtgacaatgaccaccgcctcccgcttgctattcatttattccttcaaattactctttctttttttccattattggaaaaaatggctagtacttatttattctctcaacacattattcagtgttcactaggttctgggtgcagctttagggtttaccagaagtgggacaatattcagtactctgttctttcgcatgttagtttcccttttcagaagtccaagatgatgataaaaaaataaaataaagaagtcaaatgaaacagaaattgcaaatagcagttactcaggaaaccagaaaacattgagaaagtctggaaaaattggatttgagcaagggctttctgtatttgcttggcagtgtggatgatacaaagttgtgaagaacctggtaattttccttgctacaataatataaattacttattctgttcacattttggcctatttctcctgtttaaaatgaattccttgaagttcatttgtttatagtttcagcttttaaaaacatgattaatattatgatcataaaagttctacatgctcattgcagagcagtattaaaacatataaatgtatgcataagggaaaaaaatcacctgcaatttcttcaactagagataatcactgttgaaatgttgtattccccttctagtcataacatacatcaatactatttgagatcatgttacatactttatatctgttttctaggcttcccccacctccctttttttttttagacggagtcttgctctgttgccaggctggagtacagtgacacaatctcgactcactgtaacctttgcctcttgggtttgagcgattctactgccttagcctcccaagtagctggggctatagccacctgccaccacacccagctaatttttgtatttttggtagagacggggttttaccacgttggccaggatggtctcaatctcttgacctggtgatctgcacaccttggcctcccaaaccgctgggattacaggcatgagccatggcacactgcctttcccccctttttttaaagaaaaagaacttaaaccattttaatatactataaaattcttattttaaattcttttctagccttggttgttgtcctaatggtcactcttatattgtgtggacaatatgtaggacctgactatgctcagctttatgtacatgcagtaggttgccatatgagaatatgggtaaggaattctgtcttttaatggctctgttatacttcactattgctgtggtgtcatttgtttaactattttgcaggaattggacttgattgtttccagttttcttattttataagtggtgttgcaaatgaccatctttgtattgcatttattttacttagagattgttccatgcaccatattcccaaaatgaagttacgaggttcatgaacataaacagatttataatgctttttacccattttgagaaagattaagcctgattaatactgctctcatgttgtccgaatgtacttgtttgcacaaagccccactcctgtctaatttaagtcattgatttagattttctgcctttaatagagatctaaaattaatggatttgaatttgcttttaaaaactcttactttttttttttttttttgatatagagtctcgctcagttgcccaggctggagtgcagtggcacgatctcgactcactacaacctctgcctgctgggttcaagcaattctcctgcctcagcctccctagtaactgggtttacagacatgtgccaccatgtccagctaattttttttttcttttttcttttgtagttttaacagagacggggttttaccatgttagataggatggtctcgatctcctgacctcatgatctgcccgcctcgacctcccagcgtgctgggattacaggcgtgagccaccatgcccagcctaaaagatcttacttttttataataagagatacaatgcttgccataaaaatgagcaaattaaatgagtaaaaagttaattattgcctgaaataacaatacttaaataatgtgttatcagaaaattagttttacatttttatgtaataaaatttacataaagactttatatttgaaagaataaggattacttttattctcattttccccatttttcttaatattctctctaaattgtcagagattttacatttgtcaatgccattcacctgcttagtctgtttcaagacaagcgtaaacgacaagagcaaaggaatattctagaccctcagaagaaatttcaaatgtctgagaaggatccttgaattttgctgccccagagaaaagatacgttatattcttgatcaaaagtaggtgtcttggaatgcaccgcatttttgcccacattgcaaccaagggccttctgcccagggttccaggggagtgctgggagttgccttgagtcttagccacctgaccaagtgcactgccataacgcatggccagaggtgcccaggaacattagcagatttttgactaagcctttctactatctcgggacaccaatgaggtcaaggatcttattcccagaaattttatagaacaaacacacacctgcccataacatcactgttcaaaatcaattagggatattgtatgggtcgattataagtttgtgaggatgaatttggaaaaaaacatcatggggtcccccagtctaggtgtatttgatggtattcaattcattcaggaactctcaaagtgtagctaagtacaaagttatagaatctttagaatcattactgctagacatcctacaacctgctcagaaggccacaccaactttcatgggcagttggccatgcaccatgtatttcacataattattttgtttgtaactaaagagaaacagctctgtaatggacagtgttgttatccatctgctgtgccttacatatgagaaaaccaaggctcagagttacctaacttgttcaaggagaccatcagctaagatttttttttttttttttttgagatgagatggagtcttgctctgttgcctaggttggagtgcagtggcatgatcttgactcactgcaacctctgcttcccaggttcaagtgattctcctgcctcagcctcccgagtagctgggattacaggcacatgccactatgcccagctaatttttgtatttttagtagaggtggggtttcaccatgttgactaggctggtcttgaactcctgacctcaagtgatccgcctacctcagtctcccaaagtgctgggattacaggtgtgagacaccacgcccaaccaactaagatgttaagactggatctataactggcctcactccctctacagctggtgcattgaccacttcctgctgttttgtgcagacacgcagcaaaacaaggcagtcagcaggcacaacccatggatgctttttttcccagtgaactccagtacacttacaagtgctaatcatctgaaatggtgcgaattatggaaaaacacagaaaaaaagccatcaaagattattggagtgaagatgcagtaggagggtgtgaagggttgggaggagggaagtcaggtctctctgatgctgagattctgaaagtgagctcaccatggttggtctcattcacagaccgtcttacctttggccttttttcatcctgagagtaaactctataatgttttaagtctctctaccaacaaggtagaagagtttgaactcacattggccaaaggggcctgccacaagggaaaaattctttgaaaccaagcaaatttttacatcatgctctattgtttgtttgtatttctatgtaaatgttatggtttaaactaccatgtttctctgattataaacgtaatcatttataggagtttccattgattttataacagcattgggataagggaaactacattcattatgagacacattccattttcagaaaacttaaaatatgggaaaatgtataattagaacggaggaaattcaggaagattttgctgttcgtggaagatgtgtcatgtttctgttggggctaggccaggcttctggtatctatttgtgtccacatgagagtaggcacgtatttcagtatgtggtgcaaagtctcagatgtgttcttgggtgacagggatgcgggcggttgggggtaaaaagtgtaaggaattgcccatggctggctccttctgcctccctgacatctgttgggatagggtttctcgacctcggccctattggcatttgggtcaaaataattctttgttttggggggtgatttgcagcaaaaccaaaaatgtgtccagacattacaaaattgcccctggctgagaaccactgtgttagggcaaaagagaaacgttggaagaggtgggccaacacagatcctttgatttcaggattttttatttattttatttatttatttagttagttttaagaaacatagtcttgcgttgtcacataggctgggtacagtagtgtaatcgtagcccactgcagcctggaactcctaggcttcaaggaatccctccacctcagacttcctggtagtggggactccaggtgtgcaccatcatgcctggctaatttaaaaaaaaattttttttttgtagacacggggtcttgttatattgaccaggctggtctcaaactcctggtcccaaccaatcctctctcctcagcctccaaaagccctgggattacagacaggagccactgcacccagctaagactttctttttatatcagaaggcctcttgtcccagtatgccactaataggatacctttgccatttggtaatagatttgtgttttggtcttctatctgtataacgatcagacccaagggtttctagggactcttctaggcatgaaacttttctcagtagttgccaggattataggatttttaaccagtggtaccattctaacagtgctgtctgttgaaatcctccctccttaaagtttaaatgtatattaatattgcactaagtcctatgatcatactctttattcacttaacatcctttcaagggaggctttggcctgtaattgaaataggagtaaggagtcactgggagccagcggggcaaaagcacaataataataaatgcctaaatactatttaacatgcaattaattaaatatcaacatggtctgttgatggtagaaaggtgacaagactttcttcttttctgaaggtctagctcatgtccacccttgctattagggatatttgccaaggatcattgaaagaaattttgatcatctgaggtgggaattaatcatttgtcttcgagctctctattagagactcacatattttaatgtagctaaaatttattggaaaccctattgtgctcttaataggtgatttagcagtgaggaaacaagttccaattctgttctcaagaagggtacagtctagtgggggatgatgcacatccatcaatcacacagatcaacaggggagttagactttttcagttaggtcagggaagcttcctggaggaagcaacatttgattcaagattggaaggatgagcaggagtctgctaggtgaagaagagaagctgaggcattgcttctgtgcatttgtatgaacggttaggggagtggaaaccttaagagcaaagagacaagaaaaggagaatgtcatcccaaccccatctgtctctatcagaaggtttctaaacagccacattcactccattctaagtcacccttagttgtaaattgcactcacaatgtaataatagtttttcaagtaaaaagagacatactatagtagataaatgttgatattgactataatatgcatcccaatttcagaaatgttaaatcttaaaaaaaaagcctatcttagaagcaaggacataagatatcaaaattcaaagtcggtcttgaaatgattattgctattattgtcattgcttttatattgaggtctctggttgtcactgctgggacagttttcattggccatctctgctgcccaggcacatgcttccccaccacattgataggatctcttgcttcctgctcaaacctcccctcttttctccccagctccttaattcccaatcccttgagttcccattgatttctcgcatggtgcagtttagccatgcatgaactcactgccaaccatctcaacctaaccctctgaaatgtatccagtaaggtgtattacaaaacaagggcagctctctcagtgcagtgagcatgccctgagacagcttgcaattctagacaggggtgagaatatcaggaggagaaattgtgccactcctttgcagaagggaactggggccttactgctttctcaagaggcagcattggaatggcttctagaaagatgggcttggccttgggatggtgaaaatgctctctgtctgtgacctctggggctcagccaaggcagggatggataaagaactaacctgccctgcctgccagccaaaaatagtgctaactgcgtcacagagcttttggtaattaaaccttccctctgcagaaagctgtggcttggactgataagggaccgtggatgtgttaaggtaattcactcccaacactgacattcttcactcaacatcagaagcaggctggaaaactaagtggaactagatgaagtttgagattcataaccagggcatggtatgtaagtagcaaaaagacagaacatgtgccaacaaagtttcttatagattaagtagttctttgtttttactctgagtcatatggacttttttcctttttggtcagtcagcttagttagcaactttgtttctgatcataaaaatgcttcatttttgctgtagaaagttggaaacataaaggaaagaagcaataaggaagtaaaaacccatccatcatcttatcattcacagatagccactaggaaccttttgtgtccacttttttctcgatgcaatgtacaatttttataaaattatgatcagggccagatgcggtgactcacgcctgtaatcccaccaatttgggagaatgaggtgggtggatcatgatgtcaggagtttgagaccagcctggccaatatggtgaaaccccgtctctactaaaaatacaaaaattaacagggcgtagtggcatgcacctgtagtcccagctactcaggagattgaggcaggagaatcgcttgagcctgggaggagagggttgtagtgagccgagattgtgccactgcactctggcctgggcaacagagcaagactctgtctcaaaaaataaataaataaataaaaataaaaaataaaataataatcagagtatatctgcagttttctgtcttaccttttaaatgtacacacaatatactcccaatcatactgtatctgatggggtcattcaatattacttgaaaaccagactgtttttagcttataaacctccttagggcctgagctgagtggggtgaagtatctgggagaacacacgtccatgtcagtaggaaagtgctctggtctggagtgttcttcagacaggatccatggtcccaggagaaactgacatgctgtctgggaaagcagagatgttctggtcattttgggaggcagagaaggagtgggaagttcactggggagagcattatgcagagagaagagcatgggctcgtaagtaaagcattcctggcttggattctgtctctggcactaatcagttgcctgatcatggttagcctacctaatcctctaaacctcaattttctcacttataaagtgggactaatggtattatgtatttcactgggttattggaggatagtacctgactcagagtaagtactcaatgaatgttagccatcattagtatattatttttattaatctctccaacaaggactgggtcagctgattctattggatgaggatagtgggtagatgggttcactctttaagataatctttaaaaggaagtaaaaatattggtggcttttagtattaatatgttctctcagagagaaggtgtatttaaagtttaggggagtcagaagaatgaaatcttaaggctccttccatttcattttccagaccatgaattgaggacacttcagtgcctggtaggagatttgggttcagaccaacaagcagctccaatctcagcccaggcatcttcctaatcaggcttgatgggcagctgcagctataagtatttaaataaatcatcaaagggtttgttgcatcagccaagctttttagagtcccaaatttaaaagctgagataaaatcttatcttgctgtgtctttacggaaggatccccagatacctggggttaaggtctggctcaagtcaggacctaggaagcagcatatgttgactggagagacctgggtttgaatcccagctgtgcatgttattagttatatgaccttgggcaagattcacaaccttagcccttctttaccttctcaccctaatctggggtaaacatttgtaccttttggggttgttgcaaggattaaaagaggcaaactctgtgacaatgcctagctccatgctggacttaatataaatgctcaataaattttgacaccatcttctatcccccatatcctacaagataaaacaagacagaatgagaaagtgcttaggtttcttcatctgtaaaaaggtaattggaaaaagaaaattaaaggcagaagctcactcagcctctagggtctgggagatgtcttcttgttgtttaagttttagtctgtactttctaaaaaccagtagtgggcctctggcatttcctggcacatcttagcagataggtattgaatatataccatgtgccacagtactgcgccctttgtatgggtgatctcatacagtgctttcatttcatggaggagaaaaactgaggctcagagacatgaagaaactcacccaaagtttcttagctgttaagtggtggagctgggattggtacctaggtctctctgtctcggagcccgtgtttgtaactaccccgaacataggtctctaaccatataggactcctactccttgctggaaaacataagtacaaaacagacaagaatggccttttcaattactaaactgtaagccccctgagcccaaagactgtgtgttccccgctcaatcccctcccaggcatgcagctaataggaaaccctggagacatactgggaatctaagaatctgggttaggattcctttgaaatgcagatgtcctgtgagaagtaagcacctgatttcttatatacctgagttcattagatacttatctttgatatgggagagagtagagctttctcagatacctgggtggctagctgcagcgaaaggactgaaaatctggaggggaagagctcttctctctctttattttctcactaacggaagggagtaaaaggcagaggaagtgggtctgagatgaggaagacagtaccacagggttcataagatgtacacatcagaattcctggcttgcaggccctgggcattggctggacaaggtttgttggtctctagggcacagaaagaatctatgcctccgaggattcatagaaaattaccacttcctctgtcattatcttttatttattattctctgtgatctgttggtctttgattccctttgtatttttgattcttttgtgattctccctttcgatttggcgctggtttttaccctgatctcatctgtatcgtccacacctcaatgcaggcttcccgcgcccctgcccgggctcccgcagtgcccccatctacatccctgcctccagtcttgttcattgctgctgccagattcacctccctctatgtccacctgttttggaaccttgccactcccatcctgctctgagcttttgctctgtatttcctctgcctgatgtatcctctcccctttcctcttccaaccaaaagaaagtctacctatagccttccaaactcagcacacatccttctcctttgggaacctgttcccaatgattccctcaatttctctgtcttttttttttttttttttttttgagaccaggtctcggtctgtcgcccaggctggagtgcagtggtgtgagctcggctcactgcagcctccacctcctgggttcaagcaattctcccacctcagcctcccgagtagctgggatttacaggggtgagccaccacgcctggctagtttttgcatttttagtagagacagggtttcaccatgttggtcaggctggtctgtaactcctgacatcaggtgatctatccgcctcagcctcccaaagtgctgggattacaggatgagccaccatgcctggcctctgtcttcttaattctagtagtgctgatgtgtgcctacatcagctggtcatgtgcttcctcccctctgcttagggcattgtttacctcttggacatgacttctcacctgtttgctttcctcccatctatgtcaggagttctttaaatttaatatttcttcttcatttattgagtatctgctacatgcgagcaccctattgagggttgagaaacaaagaggaattattaggtttgctcatcaataaataattgaggtgagacccttagaaatgtgtgtccattggcctgcttcaattttagacagttttttcaccaactccaggggaggccaagccaagcatgcctctggctcttgcattccacatgtctcttattaaaaacagatggcccaggactgctttggccattgcaccagttgacaggcctgttcctggggaggctctgcttatgaattctagaatcctttagctgcattagtaacaattcctcctgcagagcaatgaggggatagtgtctgtgggctgggcactttccatgaataagaaaggcctgaattcaacccaggtgccgcccagacttgtcacatggagcttggcctcaggcaaggccaaaatgggaagctagcttcagaggaagaggtcccttctgccacttctgaattcctgaagctcacaacaaccagcttctttgtcctcatttttcttaggaacaaatgtattcatttaacaaacatttgtggctgagtgtggtggctcacacctgtaaactcagctcttttggaggccaaggcaggaggattgcttgaggccaggagtttgagaccagcctgggcaacatggcaagacttcatctgtattttaaaaaattgctgagcacaatgatctctgttttcccagtgcctgcttggctcagggcctggcaccgaggtaaatacaactgctgctctaaataagctcatctctaagaaatgaaatgaatgcaaactattgaaagcaaggaaggcaaatacgggcatgcatatgtccacttcttaattttgtgtccacggcagatactgctaattaatcatagaactcattcactttgaatctggatttaagtgaagattcagccttggaatccttctgaaaacattgctccagcagccactatcagtgatttggactttgcccatgagatgaaatctgcttgtgatcctttttctggtctttaaagtggtccaaatgccactggaagtggggagcaggggttcaaaacagcaagtatattgaattaccatgtctgtccagagcagactaggagactccattcatgggagtgtccaaaagtaacaccgctattgcagaagccctgaccattgctccttcgcacttcttctcgctctcatggctcctttctgtctgacttttgtggactcctcttcctcctcatacccctcagaagtggctgttttgcagggttaaactcttatccctcccaaactcttttttcttgtctgttttctcagttggagagctaatttcttccctcagctttttctagctttttaaagtagttaactgtcaaatctgtatcttcagagatgtctttttccaaagtctaaactcctccctttggcactgaagcacttccaccatctgaccctatttatctttccagtcccctttccagtcccagctccttgcctacagaactactgctgtgagcacgaggtcttcttccatcctgtgtccaagatgtggggtacccatggggagtcctgctcccatgccttggcacatgcccctgccctgcccctcttctctgtttggtctgtcatatccatcctatgagtctccgcttcactgtcatttcactgagaaagccctttctgacttctttatgatttcagaggataataagtgccatgagcagaggatcttactagcttacgctttgagtcactcaacaaacagttattgactgcctcctctaagtccctggcgtatatgacgtgaacctgccctcaaagagcctacagtctgtttacatttctgtcattagttactcttgtttataggtcatgtctctgccattagatcgaatgccttgtggtccagagctgagtcccagtcactgtatcccctcaatcccctgggtatgccagatgctcagcacatcccgagttgagtgaaaggcagcttctttccctgtctggtttgctggtggctcttttgagtgtgtgattcttggggaggctcataaagggttgcagagctggcaggggaaggagtagcccatggagactaagggaggaagaagtccctgctctatgcttgaccccagaacagcaggaggtgggatggaaatggatgcctcaaatggaaagcagccatggctaagatgcattaagaacatgggtctaggggagggatagcattaggagaaatacctaatgtagatgatgggttgatgggtgcagcaaaccaccatggcacatgcatacctatgtaacagacctacacgttctgcacatggatgccagaacttaaagtataaagaaaaaaaaaaagaacatgggtctgcgttttaattgttgcagctcttatgcttaatgattgtgagaccttgagcaagttacttaatttctctgtgacttggtgttctcacctgcaaaatgggtcttaaaacaatgtcaactttatagagaggttgtgaggtttaactaagaaaatgagttaaaatgaatataaaacatttaaaataattattggtacaagcattggctattacttagattttcctggcagtgggatttactggtgattttcatattcatcattgtatttttctgtagacaaaatgtatattatttagctcatctggaaaatatattgtaaaactatttctttacctttttttaagagacagggaaagagtctggttggtgaaggggttatagttaactctggtaacctctgccccaggtgctgtgtgggtatttcatggtgtgattggtgtggggaggtaaccttcagctccccgtcttctgcctgtccccatcactggtccccctccagtcccaacagtcagatgctcacagtggcggtgctgacctttctgaatggtgcaattattggcgcccagtgagccttgcacagggaacagggagtgaaatcacccagcacttcctctgcaaagaggatgtgatcttcagacagtgcaatcacaggcaagtgacctcagtttcctcagaactcagcagaaggttctgaaagctggaaggccatttgcagaacccaggagagaaaggagggaagacaaggctgggtttgcaaaagcaggagcaaggtctgcacgttttatgaagtgttttacagtggagctgtaattggaaccctggtatttagcaagagttatgaggtgtgatggtcttagcactgcgagtcctttggcggcatatgtgatactggcatgaaacaggccaagcatcatggactggattgcttgggttcagcatgctgcttaaatcggcttgtttattatttttaaaaggactatttttttttactcttggggcattcaaaactccacttagagacaaaccaaaaatatttctcagttacgtgctcactgtttgaatcagagctgctaagcctaattggttggtccaattctcttactaccttctggagattaaaagctcctctagctcacttccaaatcagagtggatggaatttgatccaatccaggtgctcagggctccagaagcccttcctgttacagagagggtgagtgagcaggccgaagattgtgctttttattgctcgaagatagtttcctagtccttgaagctgagaaagcaggaagggtctcccattctttttgaaattcagaacaagcacattgtctgaagagggaggttggccttctttttgtctttcaccatgtgagggatggcagccaggactcagccttttggaatcacagagccatgtcagaagcaacaactggttggagtagaacaaaggatcttaactaggggctgtgggtaaaggtcttccggggtctgaaattgtaaggaaagtttgtctgtatgtgcattttcagggggagagttccataatcccatcaagcatgcactcacagaatttgacctgtgcactgtgtagtgagagcttgctactatttgtagcatataccaagcttgcttctgcctcaggcctttgcacttgctgttccttctcagaatacttttccccaagatccacatggtcactgtaactttcttcaagtcactggttaaatgtcacctcctgaccaccttatattaaatatcccgctcaacagtacattgcttcattgttctttacagtgcttattccatatgacattgtttgttattacctccctctttcagtatgtaagcctctatggtattcactgctgtatctgtagcatatagaacaatgccaagcccagagaagatgctcagcaaatgtctgttgaatgggtaaatgcatgaacaaattaataactttgattatacttaggtctcacctgtaaaaaaaaaaagttttaatgatgggtaaaaaaggatctgagttctcagtggggccacttctcagccatgtgtcttgggttccagacatttcatctgctatgaaatgatcacctgacattgtaatagatgtttaggcagaagttttcaagggatttcacaatgcttgtacatcattattaatttctgtttttcgaatacaccagatctgtgtgtgtgtgtgtgtgcctgtgtgtgtctgtgtaaaaatgtgtgtgtgtgcctctgtgtgtgtgtctgtgcacatcctggtgcacagatactattattattattattattctggtgcacagataataggttatctccatttgaaaatggggatgctaatactactgctactgatgtgctagggtaggtccccaaattcccaggggacctccatcctggttggtgtccaggctcttgacaccagagccagaaggaattcaaggactagtcaggaaaatagtgaaagtatggagagttattgcaagtgaaaagtatacactcaagaaaggggagtgtgtgtgtactcaagaaagtcatgcccagtggggtttgcggcttctaactttacgagtttctttaaccaaggagtggaatattcatgaaggttcctggaaaaaggtgaagatttctcagaactgtggtgccacccatttttacaccaaatatggttgtttcggaactgtcatggtgctggtgggtgtgtgatttggtatgttaatgagtgtataatgaggtcctaggtgaaacctaggtcaaatccagtgctatgttgggtccagtcggtcctagccagcttgtcccacatcctgtttttcagggtcttttatcagcccctagcctatgctgctaattcaacagtttcctttttgctagttttgtgaaactgcttctattctcctgcaaccaccctgtattattcctgtctcactactgacacaccagtgtggtttttgtgacttgtctgaagcctcacgatgtatcagagcaggatagtgatagaagtccctcttgcaaactccagttccactctagaaccattagtgttccattctggaaaagatgtcctagtagttgaatataggtggtcaagaccaacttggggctagtattttctgacacatgaacttgagtgtgaatgggatataattgcgtctgctactgaatgtgtagggttaaagttcagaaaagagatgctgcattcttctctaatcttataaaatttcattttatttttttaattttatttttttgagacaaggtctcactctgtcgcgcccaggctggagtgcaggggagtgatcactggtcactgcagcctcaacctccagggctcaagcgatccttccacctcggcttcccaaagtgctgggattacaggcatgagccaccacacctagccattgttctctaatcttacatgaggcagcaaaagttaccccactagaaattattatgctgtggctccttttgaaccaaggcaaaaaaaacaaacaacaaacaacaacaacaacaacaaaaaaaacactcatttgagaggtacattacatctgagagaaataaactctggtctcttctagacaaactgctttgattttcaagcataaacctcagactcattttgggcagaaagttactttttgtcggtatctgcatcgggtgagcttggaggtaaatcttcacacagagcttagtacatcctggataacttcctttataaatgacagcttcttagactcatcttttaaaagttaatatttttcttgttaaaacaaatgctgtcttcttccaaacatcttagatggctgattcaccatttcttaaaagtagttttaattgtacagcatgatacatttatatgcattattttaaacgtaaaagcctagcaaaaaccctacaaaaatatataagaatctccatttacacacctgtctgcaaaaccctcatccattcccagaggtaatccttgcctatcattttttaacttttctttccagaatttctttccaaacattataaatatacacatgcatatgcaattttcaacttcttaaatacatcttagatatttttccatatcagttcatatagcaatgcatccttctttttaacaggtccatacactttcattgcatcaaaatatatcagaatttattaagcactcctctattgatgacatttaggttattactcagttttttacttttataaacaattctgcaaagaatcgacatctttgtgaacatacatccacatttctcaagacagatgttaagaaaaacattttgggatgtgaaaaggtattacatatcttaaattttgatagaaactaccaaacttacccccaacacccaataccggtttggactcccatgttaaatttacctgtccttggcaatcacagatgttgtcaactttttaaagatgttttgtcaatttgatggcaaaaattggtgttttcacttactctgccctgattgctaaggtagttgagagtgttttttgcatgctgcttgtgatgttctataccttattaggtttttttaaaaaaatatttttaaattatactttaggaagcggaacatcacacaccttattaggtttttaacagggttttaaacattttcgtgaatacgactatttcagaaatgcttcttctccagggttgctatgcagctggtagttaaaatatgccttcatttattagtattggtaggtagtaaatacttaaatacttgttggtaaggtgcgccaacccaagttcactttcctcgatcttaagtctcgttacccccacttctcccctctacctctccggcctgggacctccctaggaggcaacaattaagaggttaatatgtagcacttcggggcgaacctgaaccttccagaggctgctctaatgcagttccagcctctattcagatagtttggcatattgatataccatttaaaaaatattttgacaagtcccttccccgctgtcaaccaaatgtactcaatctgtgttttatgtaagttcctggcgtctgggagattcacagtaacatactgctggtttgctccttgaactggtcactgctttgtttgtcaatttctcaggattatgcttacataatttccttttgaccttagcctccacaccataatcccagggggcacactgggggaataagatgacccttatgtaacttgttacataagagtccagagaagctgggtctcacttcagtgtctgcacagttttctaagaaagttcatttagttttctgttgtctctttcaatcaataaattctttaaaaaagcattccctttacttctgagatgccaaaggggaggggggaaccaggccaatactgattgcttctttgtagttggcacttaatggaagtgatcccatctaatttacgctacaatctttttcctttgtatggacaaggaaactgaagctctcagggactaaagtgagtggctgaggatcatacagctagaaaggggtagaagtaggctttaaagccagacacaggttcttcctacagaatatgtgtgtgattcagaattgtgcaggacagctctgtttcatgtcctattcttttgaagtgatagacattgtccactgactatactaaagcagatagggagctcagatcattccatggacttcaagtcccttagaggccagactgtggacagcccttttatctctgtgccagcgttgccctgccctggctccagcagtgcccagatggactagaggcctttgtggcctgtattttggactccttcctatcaccctttgccctttacctctggcttggcactgagttggggcagacaccaaaggaacaggtctcatgtaacatcttttcctgacatgagctgggtcccgttgcttcttctctctgctcagagaagtgacacgtgagcagagagctcatgtcagtgtgtctgcatggctggtattacaaagcctcaaggaaaaaagcttaacaagaaagcctgaggaaatggggttttggtcatttaaattttagggtcattgagggatgaagccaagagggctttgtcattaaatatatttttgataattccctcttatttttaatcctaacattgaaaaagcaataaatgcacataggaaaacatttaaacagagctaaggagaatacagtgatctgtgagtcaccctctcatttgagatacccattttctcagttctccctagaagctgctactctcagcaatattctgtgatctttccagaaatattacttgtaatctctatatatacaattatacatgtatatatttgtgcttatcaatcttctgtgtgtccaatatccatccctccatccatccatctgcccatccaacttatgctcaactctcatggttgaaaatcattaaaaaatgcttgaatccattctctcatttgatgtggtgtgttgagaccagtggacccctgacagagggtcctgtgagtcaccaggatccctatctgaaacccagtcctcatgataaggtcctccagctggtaaaggtgtaacattgagccacacactaaccaaacatctccctgagagattctgtttccataccctgcactgcatgtttccttctggagtctgtccccttcaaagcagagtataagaagatgccctgtggaacggatagttccagttaggtttgattttatgaaatctcttcttcagcaaaatctgtcctgactgactccttgacacagaagggccctgacccacaatcttgttcaccgcattgagattccctgattccatgtttcttgctgaatgactaaatatcccaacagagggaggtcaagtttctccccagcaaaaatttttcccagttaaatggcaagaatgaagagctgacaaatggctatgacatcactctttgtcataacttgccccaaattactgcatgagaagccagtactctactgggtcttgccatgggacagtcataagtagaaaacaagatgatcccccaaagaattgccctttagagagcaattcaaagacaggaaaatcacccgttggttgtgtccctgcttctagccagatcttctagagagctctagatgctgaccccttcatcttgaaaagctcagtggagacctgggtcctagcctctgccacttactggttatgtgatcttgatcaggtgtatcttagtgggtaaagtaattgtgtctatttcaaaggactgttttgttttagttgcaagtgagggaagcctaccttagtctgacttaagtgaactagagaatatatcagcttgttaaccaaagagtctagagataactttaggtgtatctggatctaggagctaaaatcttattattaggactgattctctttccatatctccttgtcctcaaacaaaggcaggtcattcccttataagctcccggcagctctggacacatcctagcagctaagaaacctcagcaaagaagagctcctccttcccactttttctagccaaagtcttaggactatatctcactggaccaacttggtccacatgatcacccacaaatctatgtggttatgaggatagagtatcctgattcaccagtcctgagatgggcatgggtcagttccatccaaaccatagggacgggagttagaaggggaattgccctgagaagtcgagaggatagaaccaaaagagtagcaagcagacactagggaggcaaaaaacaacagatttgttatgtagggtctaaaagaagggggtcaacaagtgttttctgtaaagggtcagataaatattttagggtttctgttgcaattactcaactctgctcttggagtgcaaaagtaaccgtagacaataggtaaacaataggcttcgctgtgttctaataaaaccttgtttataaaaatgggctgttgactggatttggcccatggctgtagtttgccaactcctgatctatgcagatactacaatcttcttgtcccacatattctagagacctgaacaaataagatctggcacatgcaaagcacttaagaaatgctagttattattatattgttattatttatgctatactaaggataataacaatgataatgttgatggtaattataatactaattagataatgagatatgatgaattatgagtcataagtcagcagtgtattccaggactgtttctaaactgttggtggagcttcccctccacatactcatagagctggaaggcaggggagaggcatccaactcaaacatctcattttatagatgagtcttaggctcagataagaggcagcacatgcacaagttcacacagcaagctggggcagttttggagtttgcagctgtttcttctgcaaccttaaaggactctaccctataggtagagtctgtttacacctactggtacacccatggtacacctgttataccatggtacatctagtacatttgaacatgcaggtgtagttagatagatattccttgagttttggatccatactgagtagtgtggtgatactgttggtaatattcctgaactggtggaaagacctgatttgtgactagcatgtgttatatgactcatgagaactccctgctgctgagatgactcagatgtctgttttacacaaagattaccaaacacctctcgccacgtttgaaaacaatgaatagttactcactgcctttctgactaccctctttgtcactatttctattcgcttagcatgctggcagccatttaaacagctagtcttctgtttggctggatgttggtaggaggagtcttctttaatcccccatcaacatggatacagagaggcctgtgggcacttttctctgtactcagtgtagacccattcataaaattcttcatgattctggcaaaaccctccctggattttggttaaccagcagctctgcagtagtttaggaggtggatattttacaaccacaactctttagctctttttttccccaaatttatttccaactttcatcactcagggtcatttacataaatcaatgcaaataaatatttttcttgagttaaaaaatgttgtggaatctgctggtcccaagtactacagagacctcagtacactgaatggaaaatttgggatttggtttactgttctaggccaagggtcagaaaacatttttctgtaaagggctaaagagtaaatattttaggcttcatgggccatatggaaagccatgagttgctgaccccggctgtgagtgcttgtaatttataaatataaaattggaggatggagtatttgaattggctgcctagttacttgagcatagtcctacaaactaaagtcttggatttgggccaatgtaggtttagctatgtgattctgatgcttactaggtcattttaggcacattggtggccttagttccttgtctataaaatgaggataataatagcactctatctgtttgttccttcctcctacttgcttatagaattgttgttgtgaggatcaaacaaaggaaaccacttatctcagagctagtatgttccataaatgttgagagtataatcaatactgttattaatatcaaagcccattgggtgaaagcaagtattcaagagcaaacaattaatgagctgattgggtcaccttcaaagggttctagatagagatcatcaagaaaccttttttccttctctttttaattttaattttaattttagttgtggggtacatgtgcaggatgtgcaggtttgttacataggtaaacctgtgccatagcggtttgttgcacttatcaacccatcacctaagtattaagcccagcatgcattagctatttttcctaatgctctacccccacccaccccaccccctgagaggcccagtgtgtgttgttcccctccctgtgtccatgtgttctcattgttcagctcctgcttataagtgaaaacatgtggtgtttggttttctgttcctgtattagtttgatgaggataatggcttccagctcaattcatgtccctctgaaggagatgatcttattcctttttatggctgcatagtattccattgtgtatttgtaccatataagaaaccttttttcagcatcttctgtgggaggatgtctgaagagactggatcagatttttaacaacattttttaatttaattttttaaaaattttatttacttaatttttttgagactggcttatgagactacctaatttttgtttttggtagagacagggtttcaccatgttgctcaggttggtcttgaactcctggcctcaagtgatccacctgccttggccgcccaaagtgctgggattgtagatatgagccactgacttgggtgagactggatcagattttgcttggcattgttgtgaagaccctggtagtaactcatgatagactgtcttcctttctccaaaaaatgaagcctcacattattcaaaggaaaatctcaaattaaaaatcctttcctgagcatttccttcagctatagagttcagctaaatggcatgcccagggtctggatcatcaacacagtctgaggtgatgagtgattacaggccagaggagtactgggacctctgctaatttgttccccgtgacttcatcacagctgcccttggttgtgcaattgcggttgctatggctgaagtttgaaagaacttggcctgaagctgcctatatggccaatatcttgggggaaatatagctttcaatagataggttttatgggtatttgtgaagaattagcagctatgaggttgaggttgggtatgttgatgagactggaggagaagtttgcttgagagtggcaaaatacaacaatacacaacaatacacacacttcccccccatcaatgcatacactcttaactactttggacaattgaaggctatgtctatgatgctgtaaataaagaaatattgaagaatgttattctcatcttaaagtatcaggttctttcagctgccatattgtaatgaaaaggggttgggtttggatgaagacagaccaaggtgtgattcccagctgtctactcctagctacccgacaatggaaaagttacttaactttgctttctcatctgtaaaatgactaacagtcacttctcatattgtacaaaatgtctgtcttaagggatgttgcaaaacaaaacaaaacaaaacaaaacaaaacaaaacaaaacaaaacaaaacaaaacaaaattgctctccagccagactctacaagctgtgagtccaactcaccaaatcttcacatcctgccccccaaagtagactggtaaagaaaaggctgaagtcatgtctcagcatttgagcattgctctctagtcattgctctagagagttctaatcttggggctactgataataaggggccatgcagagaagatagtgaagccctcctccacccgctgtaacctgctagtcagtcatcaatgattcttaaagcactgcctctgcctgctctcaggaaggtgagatgacgcatcacttgcttttgttttcacacctgtcccctgggaacctttgctcaaagttgtaaattatgtgacatctttagtaacaacaacgtgattcgctctgttaaatcactccctacctgcttgtagcctggtgaataaattttcattccttttttgaagattttacttaagcatatgaagaaagctcccatctgtacaatgatggaaccaaaagggacaggggctgctaacttaatgagagccaggcaggtatgcacatgaaatcaggaaacagtttgctttcctcttaacactctcttcagaaagacagcaatggaagcctgatgataaatagtaattgacacttcgcattggtgtcaaggagacaataagggatggtggggactgtggcagactggaaaatccatgcctatctaagggacaatcacttcttagttctatctgattgttgccactcagggatctaggtttcataattataagtggacaaaaccctttagtaactttcaataataatactgaaacaaagtgcattgaagtttacttaagaaaaacttaaatgagcagtggcttgcacctgtaatcccagcacttttggaggccaaggcaggtagattacttgaggccaggagttcaagatcagcctggccaacatggcaaaaccccgtctctactaaaaatacaaaaaaaaaaaaaaaaaaaaaaattagctggcatggtggtgcatgcctgtcatcccagctactcgggaggctgaggcatgagaattgcttgaacctgggaggcagaggttatagtgagctgagatcgtgcctctgcactccagcttgggcaacagagcaagacactgtctcaaggggaaaaaaaaagagaaagaaaaacttacatgattaacaatatcttactataaattaaagggttttagaataaatttccaactcttcgtcattaacattgttaaagttactgcttatttagcttagcaataaagaaaaggaatccttatcttaaggtgaataaattctgtgacatctgttaattttggtataacaatataggtaaaagttatgttttctttttgtttctgtttatggtttttgctttttttttttttcctgaggcagagtctcattctgtcacccaggctggacagcagtggtgccatcttagctcactgctgcctccgcctcccaggttcaagtgattctcctgcgtcagcctccccagtagctgggattacaggcatgcaccaccacacctggctaattttagtatttttttttagtagagatggggtttcaccattttggcaaggctggtctcaaactcctgacctcagatgatccacccaccttggcctcccaaagtgctgggattacaggtgtgagccactgtgccccctcactgcaccctgccaaaggttatgttttttgagtagctgcgaaagagacctgttcggagagtgaatacttgatcagctgtgtgcggatggggaatgagaccactccagggagccaacctgaggaacagttggcagttgtttgaagatccaccaggtttagctcagtgggctaaggaagttaagagcgagaactgaagtaaaagagaaagaggagagagactctgaagagtatggggaggaagaacaaatttgcttataatgaaattgtattgcatgttctctaggtagcgtgtgctgcagacttcttccctttctccccataaaatacaaaaacaatttctgccctaaggaactgtggagtcgaatctgctctcagataaaggacaatgggctgagtgtgtgttcagggcagatggggagagggaggatggaggaagaaagcatgattgtccatggcaaaaaaaccctgccatttctgtgttaactcaaagccctagaatatatttgagtccagagatctcatctggacttatctgtaagtcttatttgacccctctgtcttaattttgtcatatacataattcaatctaccagcttttgctgaacacctattaggtgcctggcattgtacatgtcattatatagaggattcaaataaaaacaggacatgttccttgctttgatgtcataatttaagagtcaacctgataagtcactcggcgagaaactatcctcagcataaatttgagactttacgagttgagcaggaacaagcctttcttccaaggcacttgggatgaaggcttttcacctcagttgctaaggaattaagtggtattgatgacccggtagccaacataccacatcatcaccacttccaggctgttgaggagacgtggtgctgctggaatgacttcaggaagtgcataaaaattcaagtcatgatcacttgtggtaattagaagccctagttgcttttggcaaggtcactaaacattagttggagcttctggtggacttcaggtttcctgatcctttccttgtgctttgtttaggcttctgtccaaagccatctccatgggagatgcttaagctgataaggtcctgccactcgctgtcagaggcacctcccagtccctgcagacttgggtccccttagtacctccaaatcactagtctctcaaaaattcttattaaacacctaacatggacagggcccagggatagatgtatggcccttccttcacagagtctaaggcctagtgggagaggcaaaccatatgaatgtgatgaattgtgcaacgttaagatctcagaggcatgaaaagtagattgggggctcaggaaaagattattcgaagagacaacatcaaagagtcacttaagatttcaggttcgaatgtgcgaagtaaaatattccccaaacaccacgaactgcatctgtgtatggaaaaggtgggaagagaatggatcgtgcaagaggatgtattgcacttgtggactgtgccatatcagcacaaagccctgtgaaccagcctgtctccacaagctaccagagtgataaatatacattcttctcttaagaagaaattctcctggtgagaacattacccttcaggggtgactggatggctcagtttatcacttgtaaatttagcagatcaaactagttgagaagcagttgggcagtcagtaaactgactggactgctgggatcaacagggactggatgtttagttcactttcaatagccacaaatttagcagctcattagaaggaaccaaagtaaagaactgcacaagtcctctgggaggccttgaaaggcttccatgggcgatggaagccatttagaggcatggtgttgctgagccttttaaacacgtgattagctaaagagagaaagatgttactttggtctgcatttctctagggcaggaggaagtgaggaagggaggagcagaacacttcagcctacatctcaggaagggaggctgagaagcagtgtctggctgagcatgctgcttctctgagcagatttctagaagcagcagaggtgtgggtgtggacaggaaactctctatgtctatcaccttctgctgaggctttttgtaaacaacaaatgagatagtgtagcataaggtctggtactaccttagtttcccattgttgcagtaacaaatgatcacaaatcaagaggcttaagacaagacaacttattatcatatagttctggaggccagaaatctgagttgggtctcactgggctaaaatcaaggtgtcagcagggctgcattcttttctggaggctcggaggaggagtctgtttccttgcctttgccagtttctagaagcttctcacatgccttggctcctggccctttcctttatctttagagccagcaacattgggctgtgtctttgtcatgctgccatccttcagttctttcttttctgtttccctttttcatgcataagaacccctgtgattccactggtcccacctggagaattcaggcgcatctccctatcttgaggtcagctgattagcaaccttctttgcaactgcagccttagagcccctttgccatgtaatctgacacatccacaggttctggggattaggacatggacatttgttggggcattactctacctatcactggtacagaataaaaagtcaataaatggttctattcattaccagtactccctaccaccttctttctctactgtgaaattacctatgcccttcagtttttcaaaggcagggcagaagcctcagctctggtagaatctgacgtgctggaggttgaaagtgagaaaggcagtctttgatgggcttaggggagtggggaagtgaccagcccttacctggaaggttgtgtgcaggtctgggaggcacaggcaagtaagtagcttgaggtgctttaaccaggatagtgacaaacttgggagaagagaaaaccctgagcagaaacttcatatgcctcaaaggttggtagatggagaagggattcagcttcattttctgtaagtgtcgtgattaagtgtgtgcaccttgttcaggccaagctgggttgccatcccagctcatctactcaccaactgcctgacttggagcaaatgtgctcctctctctgacctccagtttttcatctataaagaaggactaataatagtagctatcttgtgagagtgttgtgggaagtcaatgaaataatgcatgtaaagcatccagtacattgtctgatggcaactgttattattaggtagctccacaggatagaaaaataacctgtgggtaaaagctgcagggaaacagatataggctcaccataaaggaagggcttcttaatagtcaaagctatccaacggcgggatggttagagtagaagtgataagctgccctgcactgcaactgttcaggcattgaccagacattggtatgtggattagctgcaacagtgtcatctgggtgcttttgcaaaagcccagaggtctaggccccatccagatgtgatgaattggaatattcagggatggggcttggagatctgttttgtgctttgttttgtttgtttttatttaatatgctgttttttaaagagtagttttagttttacaggaaaattgagtggaaagtacagagagttcccatatacccctgctcacattcaggtgcagcctccccaactgtcaacatcacccaccagagtggtacatttatcacaagcgatgaacttacattgatacctcattatcatgcagagtgcttagtttacattagggttggctcttggtgttgtacattcatgggtttggacaaatgtatgatgatgtgtatttaccattatagtaacatacaaagtattttcattgccttaaaaaatcctccgtgcttcacctattcagcaccatgcccctccatagttttgccttttccagaatgtcatatagttggaatcatacagtatgtagccttttcaaattggcttctcccacttagtaatatgcatttatttttcctccatgtctttttttggatagatagttcatttcttttcagtgctgaataatattgcattgtctgcatgtaccatggtttatccatttgcccactgaaggatgtctaggttgcttccaagttttgggaattataaataaagctgctataaatatccctgtgcagtgttttgtgtggacataagttttggagatctgtatttttaacaagtgatccagagacagagttggggccactagaccagataatcatttgtccagaggctgagaggggacaggaagactctctagtccagaaattctagggttccatgactgttgtatgtagctcttggatcaggctctggtttggactaggtgttaactttcttctctctgggatccttcccatcccccaacagcaaaatcactcttttggccaaatgttcagtgtcgatgtctattgctagcatgaaattgcctaatataaagagcaagttttctcgggctggagggagagtgggctgaccagtttttccaagtccaggactgacagggatcaaatcctagctctaccatccattacatttgtgacattgagcaagtaacttaaccattcaatgacttcatttttccttcagtaaaagttgctgatagtagtacctatctcctgaggttattgtgagaaatcaataagttcatatataagaagacttagaaaaatacctggtgtgaagttagttttgagtaaatgttagctgctgtcatcattattgtcaccatcattattcttattattaccagttaccagacattagggtccctctgatgggggagtccttcccggtgaagaaccagagttggagtgaacccttgaggttatttcacagcagcaagtgctggctgagtcagtgggaataggatggttcctgtgtgccctcgttgcctgaagggaggagtcagttgagtggatgccattttcttatgatggtacatctggggccatggcaccagcagcatatattgtccaagacagacaacaaggccatagctccccagagctcactttgccttttctctcatttagcagcacttcctctctctatcttccctctccatgtgctagaatgcaagtctcataagtagctacctagtgccttggtgtagatggtagttctaacatgtccattgctctgtaaataccccaagaaagagtatacccataaaacactggactcaaaggcaaaggacagcacaggtttaactttgctgcagaaccacagcacaggtttaactctgctacttccaagcttcatgagcttgggcaagtttcagaatcttctggagcttctgtcttttcatttctaagatagaataatccttccctctccgggatgtcattaactcttgatgaatgcaaaaacgctttttaaatgacacaaatgttattattagcttatttgttagaaagttaaactgatgaaatgttggttattatttacgattgaaagatgaacacaaggagaagagtctgcttgggttcctgttatggaagacaagaaaggaaatgtatgagagttctttgctgttatgggcatggaagagtagaaggaagatgaaggccacaaacttcttctttggccagtgaggtcactctgttataacctggactaccttaaggccccgctgttttgcctcatctgaaggagatgtttacatgttcccaaagtataaggtgttctttgggcaaaattagtacctgttcttttgctgggaaatccaccagtatgggaatcagccatttaaggccaaagatagatatactatatgtatttacttctaacaccataatttaatttgcctatttttcaactttagctcaagtttagcactcagacaaaaaagcacacaaatcttacatgaatagtgtgattaatttccacaaactgcacactcatgtgaaatgagcatctggattaaaaaggaaaaaaaggagaataaaattgctagcattcaagaaacgctgtggaggcctcagaatttcaaacacggttgacttcaagactgatcctggcaatggtatgcagttagcaaagtttacgtcatttatgttttgacatctccttttgtctggcttccagatatggttctgtccaggacctatattaaggggttcctccagacaattctattttgggggatggattgagaatctcctttatactaaggtgtcagtgaatgggttgctttttccgtgagtttctggcttaaatctgggtccttgggtggaatccaaagggatagttctctcaaggaggaaatttgggtctctgggagccagaagtgggtgactttgaaggtctccagggaacttttgaggaagctcttaaacatcatctcacaaaagaattgtgtggcgttttgaatgcctgccatggtaaatcttgcaatttgcaaggtcatggtagtgacttgccttcttgcttgggattgatgctacattgcctggttggctgctcagtctagaaggaagaaaaaagagacagactgcactgaagaaaagcagttgtaaagtgtgataaaaagacccagtcctggctaaggtatacagcacctcacccagtttctgcctagtgcctgaaggcgctgcagctaattaaaccacctcttagtcaacatcccagtcactcccatctgggagactgattggaaaggctcagtttgagaaacttcagaggctagaagaaactcccaggcctgagggccaaatcctgagctcttttaacctcaagctcagggttccagtggctcttggaaggggaatgagtactcatgctttctagcagaaggaccacattttggagggtccaatttagagatgttgatgcttggtagttgggtcctaagatatccttcacggacaagtgcatcttcccgggtcctcatcagtttccccaaaggccttgttgggtgaacctagagtggttcctcgttccatcttccctcaagagtgctgggagcattgaggccaccatccttggtcagggcagctggatcacaaccaccagcagaaaagaaccagacctgctgtgatgctgcccgtttctgctacacactggttttcccaatgcaggtgttccctcctttttttttttttttttttttgagatagaatttcacccttgttgcccaggctggagtgcaatggtgtgatcccggctcactgcaacctccacctcctgggttcaagtgattcttctgcctcagcctcccgagtagctgggattacaggtgcctgccaccatacccagctaattttttgtatttttagtagagacagggtttcactatgttggccaggctggtctgaaactcctgacctcaggcaatctacccgcctcagcctcccaaagtgctgggattacaggcatgaaccacttcacctggcccgcctgctttttacaggacgtgacttccccacttgaaaccatttctgatattccttctctcatttctctcttcttctcagatttgttagccttctggaccactacctcttacaatggagtgtcacaaagaacctgtgacaagaacatattttaacctaatcatccattcattcattccttcaggcaacataaactaattgagcatctactatgtgccaggaagatgctaggcatggtggagacagagacaaataagacacagtttgtcctcaaagtgtttatgttctagtggggaaaacatacaagtaaactgtgaaaaatgccttgagagcacaggcgacatggtaaactgcatctacaaagcaaacctgggagtcatcaaaggcttcctgagggaagtcattcctgagttatttggaaggaataaaagttggtctaagaaggctgggttggagggtgggtagaggatgttttagctagcagagatggtttgcttcaaggcaagctggcttattcatctggaaaggggccaagttgccccggctcaaaacccagagtgcatgccacatgaatcttcctcagcttgttgatgttgtgtgaagttatcaaatgtattttcgtcttgttccatgaaccagaggtgggtagccattacttcagaattgacaggcctttggggactaggctggccaatatgttcctgggccatggcataatctttatttttagaagaggttcccaatttgagatgatcaaacaccccaccccagtctctcattgggccctggaggctcattgttacttggtgtcttatttctgtttggggtgatgagtctatctggaaataagcaaatttgttgggtcaaagctggctaagtctctgcctggggaaggatttcacagaagtccagaggccatatccttaaggttgtactcctgatgtcttttgaggggttatccagtcattccatcatagggaggctgatggcagtgggaccttcccaggcccccacccactctggaccctctgggactttctgtttgtaaaaagcaccagcaccaatgtattggcaaggagatttactaaaactcaacagtgagtaaactctcttactggtcattttgcatcatatgagggatttcaggcaaagaaaggatattaaaattgagtatctactatatatcagatactatatcagtgctttcatagatatcatctcactggagctctgtaatgacccagtgagttgcatggtttgtccaaatgactaaatgtcttgtctcagccactgccagaaaagagacattttaaccaagaatcaatggccatgtaattatgtgattgcattccaccaacttgtcttctgacagttactcatcagagctggtgttttaacatctgtttctgagccaaacaaatacaacttttattgatcccttgaaaactttgtctcctgctactttgtctttgcagcttctgtgtagacacctgaaggctccactggctgtatacctgccattcattgtattagctggcttgggccactgtgcttaggaagcaatatggaaaaaaaggctcttctccttcgatttctcatcttgtcttttctgagtgccacctcaccagttccacagtaattgactgtgcctgatgtaggtggtctctcaatgacttagtggtaagtttagcactttgctggtcccaatgccagtttacctgtttgactgtgttcccaaggcattgacctgcccatgttagaaatctagacctgagaatgggtgaaggatggatgaggaattagaagatgctcacgtctgaattgtgtactgaatttcatcccaacccagctttattggccctagaaaaacatgcttccgtaacagataggacaggttaaaaggaacacaaaaacatcaagaaatggttgttgttattgttgctgttggtttgtcgctcatctctacctttccctgtgagggttgtggtatagctactgagctgtctcatggcgaatgaaatgacttgtcttcatggtcagctctaagcttattccatcgtgggtacctagaatggaatccacatctctagaactgaatgctactactatccttttccctacctggagaattagagaatcacaggattttaaatgttaaagaatttccaattcaaccctcttattttatagattaagagaatgggacctaaaaaataaaaatgggccaaaattgatacttaaaccttattgatatcttacattagaacgtgtttttaccatttcatagcagtttaccctactgtctgttgatcacagaaggtaacattatatccattttatcctcatacttttcccctgacacacccatttagcagccgtcctggaattagaacacagacttcctgacttccagtcctatcctggcccaataccatcatgattcaggatagctatacactgtattctttaaccagcccctcgaatggactggaagaagctatagaaaagaggtttgtgaagtctggagtgcctcaccagcaggaccagaaagtaattctgtgatttagcaaatgaacgctgtgaagacacaatgaatagaagaagggactgaaggagactttggaggctgtcaccctttaagtttcatttgcaggatctgtgacaacacggtatctgtcagagagagactgacatcttggttggtaaacatctttgacacagttaaggcaggtcttacaggatctaggaagggtggagggatttgcaggctgttggaaatgccagaaagtcttagagtttcaggcccttttaaagcaggggtggcattcttcaaggagctgggggaaaccctggatgtgggacaatcaaagctgaaatctctgcttcctggttcttggtgctcgagctgatgcaacaggtatttccagcattcttatccaaatacaacaactgtcttacgggagaggacctgcagtgagcactgtttttgttcttgattctagggtgacctagtgtcttccagtagggcaatctctggacatctttatctccccagtacctctccagatcctgaagcctggggccagggaggagaggttagatgtcagcagtggaaggacaggtgggtgaagcccattgcaaacctcacatcctccaggagaaacacaccagttgcttttaggctccctggggagtgttctgttgccacctcatcaaatcagtgaaggtggaaaaaagagtttggtgccagctaaggtgacactgaagtgtgcagcaggaaatctgaatccaacaccacatctaatgagcctattattacaggctattggcaaagcaagggaaatcgaatgctaatgaaaagcaggttctgagaatagtttaaaacttagcgttagccccattacacgttcccttctgagtcacagaggatgatttgcacgataagctgagcttgccttgaaacaggactcacgtggatttgcatgagaaagaactgggcagagattgcaatattaacagctgtttaaataattcaatggagaggctaaggctgaaggaaattatgggctcattgttaaaagtttttaattatcccaacagctgtcccatcacatggccttactttgttaggcagtggaggccatttgagagatcggcctgagttggcgcactggaacttccaacattaaggcattgcattgctaatattcctcaatttaggaggcagtcaagcagaaacacagatggtgggcagtgtcagagagcattagcctcgagggatttggtggacccaaatccaacctgggttttattgctttgttctgtgtgcacagccacaggacataggaagggaatattagtaaaggggtaagcgtgcccactggacgtgacttactgtgtatccggtggacttcccagaccagatttggcactttctgctcattgccatgggagcaaacctgctggctgttgtgaccttaggctttccatctgtatccaactcacctcttcctggtaaccatatctcttagggggcgctgaaatagtcatttaaaccctcataatattcatgatggtgacagggcccagcatgacttattacatattcatttgaatccatgtaaaaatcaacatgtggaccccagagtgtgcatctgggtgggagctttaggatcttggtagtaagacagatttccaaattgtgtatgttccatttatttgctaagctctagacaaattgcataaaatacttgaagaaacccctcatttcttctaggtttctattcaaatgtcccttcatcacagacgccttccctggacacttgatacaaactcatgctgcctccccacacactgctatccttctcctccacccttgatgtggtttggctgtgttcccacccaaatctcatcttgaattggagctcccataatccccatgtgttgtggaagggaccccgtgggagataactgaatcatgggggcagttaccctcatgctgtttttgtgatagtgagtgagttatcacaatatctggtggttttataaggggcttttcccccttttgcttggcgcttctccttgctgccaccatgtgaagaaggacacgttctcttccccttccaccatgatttgattgtaagtttcctgaggcttcccaagccatgctgaactgtgagtcaaacctctttcctttgtaaatttcacagtctcgggtatgtctttattagcagagtgagaatggactaatacaacccccctctgagcacttctcactacttaaaatgtatttatccatgcatttgttctctcactaaagtgcacactccatgatatcaagggctctgtctttttgtttactgcaacatctttaacatcaacaacagtatggtgcctgtaatatgggcccactagaaatttgtggaataaatgcacgaatggtcaaaatctgactgaagtggcatgctgccagtctgtctgcagaagggccttattcccaggggcaagcaaggggcccttttagagctgcttttcaattctcaatttctcttggcaaacattgattaagcactcaggactaggtgttaaagatcacaatcttgccctcctggggctcatagactggtggagaatgtaggcatttaaattaaatccatccttcaagagctgactcaggtctcggccccttctgggaccccttcttgaacattccttcttcttccctgaacctgggttaggcattgttcttatgatttcccatagactcctttgcaagcttgctcatggcctgtacataaagcagacaattacagtacaatgtgctttatgtttcctctctgagtaaaggctctttaagagtaaagattgtaccatacccattactgagtatagtgtctgatacatagagaacactcaataaatataagttatgcctgttattgtcactgttaccaggtgtgtttgcaatcagcatttatatagctgtttgtgtgaacacattttttaaaacttatatcttattctaaaggtatataggcttagaagcagctgtatattatataatattctatcatgctatactatatgatagttcccatgtcagtctctgtttgtgttctgggagacgtagtgattagttagactaattagaatagttggaatttttagattagtcagaatttttacaaagagttcttgggggactctgtgtttccagctgcgagctgagtccctgaattaccttaaaaattattttctatgtgcaaacatcaagaactcttacaagtcttccatatctgtttaattccaagagggtaactcacgagaattctctcaataaatatttgtgggtttatagtattttgatgtagccactttgatgtggctgttttgattcagggcttcagggacattttgttatggcctaaaaaacaaaccattaaagaggcagcaattttgtacaacaaagaaatgtgtggcacaggcatccaaccacattgccaggttgggtgtgtatgctaacctaatgtttgtgtgttttcactttgacatggctgttttgatgcctgacgcttccattacatcatatggatcttgccagaatggttgctttaaatacttcctagttttacttgaataccaaccatgtgcctgattctcatttcaatggcaggagggattcaaatgaagcagaaggcaaggagattaatgatctcaaggggactggagagttttgccaagagctggctaaggaaatacattcaccatttcagaacgcatactacctccattctttgtttgacatttcctggtttagagcttcagattacttgctggagacatgtttaaaaatggaaaaagatcccactgcaaacacagaaatatggtctatccacgttaaaaaggtcattttgatcatttccccctgctgtgttgtaaaatgaattttctgtctgtttcacttggcgaggggaggaagtgatatttgttgctcactgatcagaaaggccctcacccaactgctgtgagcagtcataccctattttctttttcagatggtctgagggattgttattgcacacatatgtcaggaaaccagaagttgcctcagaaattaactagatgaatagaaaattaggccattaaggggagactaagaagcctatattttgactaacattctcatctggtcatgcaatgttattcctaattttaaaacatttgggtagcaagtatattaagcagcctgttatgaaaaagcaagtagttgtatttgggttccaggtcttaactctgagtctggaagctaagttcttggtgtcttgctagaatggcagggcaagtgggtaagccccctgaacaaaatgtcatccttgtcatgaagttgatgggtgttatatgtctcttctttgtgtgcactggagaaaggtactatgctagcatatttttgtttaatttttatgaagtaggcatcaggcatttctttctacaccccacacagctagcaagagttggagtcaggatttgaagtcaaggccctctgactccaaaacccacactattcccattataaccagttattccaaaacactggtctgcagctcggtgttggttccaaaggaagttttctccagtctatgacaagactatctggataatgcaacacctccctgtcttgaaagcactgtcatctgttcagagacacctctctttctaggtgtgaaaggcttattttttttcttttatcaaatgatggtgattgtaaatagcagctaaaaaaatgttctaagatatcaaagtgaaaaattggcctccctatggcaatccccaagcttacatctggaatcttattggcctgggaagtgacaaagctgaggaaggagaagtactcccattaccccagcaagggctcctttgggcagactcccaggatggcttaggcttacctgaggttaacccagaaaagggcttggctgcagccatagctggaggtgatcaaaatacttcttaaagccatacttcttggactctaagtggtattagctcttgccagtttagctgtcctgataatgtaggtggccttttaaaagccacaataggttgaattattattattatttttttactagataaactatcttttccaaaaaagaaataaagcttggatgatcagtgtttgtgacgtttacatgtcaggatggggaaggcttgagcttggagatattttaatgttgatgtaactcaagtatgactctcctgaaaaagtcacctttttactgttgttacaagaagaaaatagctcaggctttggagccagacctatctggatttggatctctattttagcctttgcaactttggtcaagactcaagtaaaggctctgtaacatgataacttccttccccaagttaccacggggggcaactctttggaagatcctaccattgcatgcggtgttcctttcctttactgggaggatccacatcagttctcagtgtgtcctcctgtcctgcttataggtgaccctgagtcacacttacttttattttcctgcagatggttccagattccaactgtgcctggagaggttcctactagtcgagcccctgaaactgtataggggaggtgccagtctctctaatctctgccttcacttctgttccagtgccaacaatatgcccaagcaggtggaagtgcgaatgcacgacagtcatcttggctcagaggaacccaagcaccggcacctgggcctgcgcctgtgtgacaagctggggaagaatctgctgctcaccctgacggtgtttggtaggtacctgcactaccccacccccagccccctcttctctgggactctcctggctctgtggggcagctggtctcagcagccagcccttccaccagaaaggaagccacgtggtttgcctagggccctgtctgcccaggcttcagtgatataattttcctccttacctcctctagccattcgttctcctttggattctagtagttcttaaattttttgcaaataaatatcttgtgagagtgttggcatgtggattcctatacttatggagactttgctttgggccacctgaaatgaggtcctgcaatctacatattagcaaacctaggtggttccaaagcattggtccatggaccacatttagagaaccgcctgcatcaagataagcacaagtattgcacaaaaccccactaaaatggctcccaaggtctgagcttcttcagacacatcattaatttaggtaatttgggcacattagctaatgaggtcagtgtggaagatgtttgccccaatgccttgatctgctccagctccatcttgcaagtcctcttcctcctctgcttcaggcctcacccaggcgatggttgttctcaggctattgatacaatcttggtcttaagattcccgtgagggtttattgaaaatggggcaatatacagtttcttgtaatgacaaccacaccatttcctttctcaatccctcccttgttctgcagctctcacttaggtttcacagagaagcagtgaacaacttgtccttcccacccacccacctgcacacacctacctgaacccctccattccatggcctttcctttgagacagatgccttggttgccagtggcccaggatcaggactgggagctcgccacagctaagttcacttaataagaaaccacaggcatggttaggttttccaaaggttacccgccatgtaaccacatctaattcatcacaggacttgaagaagttggagagtgggatttttacctgcagaagaaaaaaaatcaggctttcagccacattactccttcctcatctgtggaattaacactgtagcctgcattcctggaactccatccctcccttatggccagtggtactatgacccaacttgtggtttctgaaagggtcattcatgttggccacccatttgcagagatataaaatttttcttctgggaactttgagtctgtaaagtgaaagatccctgccagcatctctgcctaaattgtttcctccaaaattatatatcttagagtccattcttgagctcccataagatcagcaatctaaaagctatgtaaaaggacatagaagtcaaggacaagccttgagagtgagccatgaggaaattattggaagccaaagaaaatagatgggaagaaaaaaatagaattcacactagcttggtcaattaaatgttcattttatcttgcctccagttacaatgagaagacacacattaaatgccatgccatgtggccaagcttgagctgggcaaggaggcaatatctgtccttgtgggttctttctttcttttttctttttctttctttctttctttcttttttttttttttttgagatggagtctcactcctgttgctcacactggagtgcaatggcaccatctcagctcactgcaacctctgcctcctgggttcaagcaattctcctgcctcagtctcccaagtagctgggattacaggtttccgccaccacacccagctaaatttttgtatttttagtagagatggtgtttcactattttggccaggctggtctcgaactcctgacctcaggtgacccactcgcctcggcctcccaaagtgctgggattataggcacaagccactgtgcccagccccttatagtttatttctataaacaatttctggctccaagtagacaaatagcctcaaataagttggagtcaagttgccagtgtgcactttcataaagccttgagttctccttgactctttgggtgctgactttttaagaatagttggaggtatagaaagttctcttgctagtcatcaaaatcagcttcacttatctaatgttgtttttgttacacattgttcatcatttaatactgcagaagcatgagaaaggtcaatgttgctgaaataagtgtctagagtaagtcatttgacgaaggcaaaaaataaattcatattgttttccccttccttttaggtgtcatcctgggagcagtgtgtggagggcttcttcgcttggcatctcccatccaccctgatgtggttatgttaatagccttcccaggggatatactcatgaggatgctaaaaatgctcattctccctctaatcatctccagcttaatcacaggtaagactacctcactagtgcctggctaacatgggtcatactcctgccctggcttttaattaactgtagaatctcaatttggttgagtgaatgtgatcgtctatgtcatttcatttcagagctttggttttcccgtctctgaaatgaggataatcaaccctaaagaaataaaagcttgccatcgattagtcagtctatttgtctttctctccagcaaaaaaaagaaaaaaaaaaaaaagaaaagaaaaggaaacacagccacatgttacaagtgatgatacctctagtggttttaaattttttttttttttgagatggagtctccctctgttgcccatgctggagtgcggtggtgcaatctcagctcactgcaacctgtgcctcgtgggttcaagcgattctcctgcctcagcctcctgagtagctgggactacaggcatgtgccatcatgcctggctaatttttgtatttttagtagagacagggtttcaccatattggccaagctggtctcgaactcctgacctcatgatccacccgcctcagcctcccaaagtgctgggtttacaggcatgagccactgcacctggccttaatttttaatgtctacttttctcccctttctaaattatattttgttcagatactgataaaggtaatagatggaaaaggaaattatctactattttaattgggaattgagggagattggcattaaaaataaatgaaatgctaggtatgaaagccctctgagtttttcagaacaaagttactcctaatatgtggcatcatgttcacttatttttcactaccaccaagttggccaatgtatgatttgttaacaggtgtatatcctgagtcccagcatcaattatctttgactaaaataattaattactttatttgaaagaatttgttcttcctctgtgggcttatactggtattttcctccttaccaaataatattgctcaaacagggtataaattgatgccctttggagactaaactctgagttaagggcaggaagctgagctttggtccatatttgggtaccagccagctaagtgatctggagaagttgttcccctggactggccacctcatgaaagaagtgagtgaggctctggtaactccaggagattcaggggctgagctgggttgaggcttcagctggttgaccagtgaccccagtacctgaaatgctggaactcaggatcaggcacttaggggctaagtgggaccttatcattcagcgctagattgagtgaaagggtgcatttaccatcagtgctcctctataaaccagagaaaatgttctctgcacctgttaacaggtcatacgttggccaacttggtggggaaacctagctcccgtcggctagaattagactaggttgtaaagagaagtaggtcacacgtaggtcagcttaatttagagcagctcacatcactaacttcttcccccatagcaaaaaggactaacacccaaaaaggggttcaatctctctttctggtaaaagcaggaactgaaaccaggaagtgaacacattcaagaaacaactggaaaaaaacccagtggggctggagtttttgtgaatttgcttggaatttcctctaacctccctaggtatagatgaagtgcccaccattggcagggtgcttcacggggtgttccctaatccctgcatgaggctgggaatgtggatcttcatgcttcacctcagagaaatgagaggactgggcaaaatcgttattctcagactctccatgtcagttaccagtaatatattcaaaagacattttgagtgtggcacagaactactagctttttagtcttccaagtgaggacattaaaacataaataaataaacaagttaaaaactagcatgtaccagcagcatcgcttcataaaacaaaggagatgttaagaccaaaaaaaataaaaagtggaaaggaataatctcagaattaaaaatgggatgtcttcaactttattttaactcattattgcagactgacaaaaaatttgttacagaccatttgtaaactctaaacaggaggatctccaactctcccagttctgtaaaatcttgaaaatctccctggataatagaatgataaactatgggattgatcaaatattcaatacagtcggccctgcatatctgtgagtcccacatgtgcagattgaaaatatttgagaaaaaaaactaataaaaaatacaaaataatgcaagttaaaaatatagtataacagttatgtacatagcatttacattgtattaggtattgtaaataatttagaggtggtttaaagtagacaggaggatgtgcataggttatatacaaatactacaccattttacagaagaaacttgggcactctcagattttggtatctgttgggagtcccagaaccaaccctctcatggatattgagggaagactacagtaggagatttaatcaaccattaacacatttgagtaatatgaagctaacgtcatagaaatgtagacacaggtcattagcacaaacgtaatagaattaatccttctgcatttcttttcaatccagggttgtcaggcctggatgctaaggctagtggccgcttgggcacgagagccatggtgtattacatgtccacgaccatcattgctgcagtactgggggtcattctggtcttggctatccatccaggcaatcccaagctcaagaagcagctggggcctgggaagaagaatgatgaagtgtccagcctggatgccttcctggaccttattcgaaatctcttccctgaaaaccttgtccaagcctgctttcaacaggtaacccagagttcagatgttctctcttctccagtcctctaagttatcaaggcgataacttaagagtattttaacagaccaactctgggtagaaattttctaaatatataattatctctgtctaggcccagggattctatgaggtggtttagggcaggatcttgggattggagtctcctggttttaatttttttaaacatccctttttttccagctcacttaatatatttttgctgtgggattgtcctcctttctcccccaccccccccccccgcctctctctctctctctctctctctccctccctctctctctctctctctctccttatatctatctcttcctttcctttttgtgcatgaggctgggaaatgtgtctttgagttgtccatgggcatatttttattagccttgcccacaaccttctagaatacacagtggttctcaaacgtggcagtaaagctaaaccaccaatggcacttttaaaaaaatacaaataccctacacaatcagaatctccaagagatgaatctggagcttgggtagttttttaaattgtggaagtaatacatgcagattatgaaaattttagaaagtatagaagtacacaaagtaaaagttagaagcttctgcttccccttctctagagctacttatgttgagaatgctgtttcctcccctgtatttttcttttgccacttatgcaagtgtgcataatctttaaaagaattcaaccctggctgggcgtggtggctcatgcctataatcccagcacttcgagaggccgaggcagggggatcatttgaggttaggaattcaaaaccagcctggccaacatggtgaaaccccatctctactaaaaatgcaaaaattagccgggtgtggtggcgcatgcctgtaatcccagctactcgggaggccgaggcaagagaattgcttgagcccgggaggcagagattgcagtgagcagagccactgcactccagcctgggagacggagtgacatactgtctcaaaaacaaaaaacaaaaaaacaaaaaaaaagaatttaacccaatggtactccattgttcataaaacgttacatctgactttttcacagaacaatgtttgaacaatgaaaaacattgaacaatgttttaaagtcatctcttctttttttcatgattgcataatatttttaaaggataaattcctagaagtaaaaatgtccttgtcaggacaaggagttttgtattttgagtttgctggctgttgcaaaatggcactacaaaagtatgtagcagtgggtacagattccttagcaatgtatactcttgcttgctgcatacatgcctatacatttttttaaacttgagatttttttaaaacaggtgattctgttgagtggaaccactgagttagctgagtaggccccattcactaccctgttttctagccccaaggccagcataggctagaacacatcccgcacaccccggtttccattaacccaggtagaaactaagctaaaaccaagcagtctaagctaaaacttcagccatttccaagcacagaagaatgagcttaggaaacagtttgcttagaagaaaagtatgtattcctagctgtctccaaaatgtagtccttaaccattgctgagcccagattactctgggttgggatatgttccctggtttcagatactattttagtggaacatgtagcatggacctatattaaaggaaaccattccacgccagggaagttggatgcagaaataaacagaaataagctggagaagaaggtgcttagtgggctccatctgtatagcgtgtttgcccctcagccagcctgctcagaaagatgaactgacttgctttagtgtgagagacacgattgggtgctatccattcttaacattttggaaagagcattctgggatcgcagctgcaggaggctgagctggtagtagattgggggagagtggagcataggagggcctgggaaggacagatttggacacagttctgtgcctggtcatgccatgctctgtgaaaaaaggaaggcaggaccaagaagcaggcaggctcctggagctattgctctggtcttggagtgaacttttgtggagctggccacactcacactcggtgagcgctgtggtggatgggcagtctttgcatgcagctgcccatggcaaaggctgctctctgccattctggaatagagacctgagccattccctgccccacgccagccctgaccccaactttctattgccaaaattcatatgaggactgagccttggtccctcagtaggctcagtatcaaggtccctttggattaggacaacctgaggaagaatggtgtagaatccacctcagggagaggatggttacagattccttaagcctggaaggaaggcactgaagaggacttgaggacaggaaactcttttaaagggacgtggcatttccagagagaaagggtgcgtgagagacatcttctgtgtccatgagtacagctagaagtcatttaaaataacctgtcttgagtggaggaggctccttgaccagagttagaaacagagatgtaaagaggaagatgagctccccgcagagtggagactgcctcctcccaggcgacagggcctggtttgcccaagttaagtccctgtgtctttgtgagcagagaggtctccagcttgctttctggggcttactttgaaccaaagtgagatttccaagacagtaactggctgtaagatatgaccttacaacgttaaatccagcccagtaatagagaccgcatgggttcttttcctccagaaaattccgtgatctgtgtatgttcactcggccaatacttgtgagcaggacgggctgccaggctctctgctttgtacaaggatgccacggggggaggagacagatgaggaccctgccccaaggagctcacttacattaaaggggagggaggtagaccaaaacaaacatcagggaaacacagaagagacttaaacattaagacaggtgttctctgagggctagaggcaggatgataggctggtggtaactaggggagatatttcagctgagaggataggggatcagaatgagttaggcctacaaagagctggggaaaggagcttctcagtagaggcacagatatgcagaagctgaaaagtacttataatgttcagaaaagaaaaaggaggctgtgtgaggccagtgtggaggtatagtgagtggaggaaggtaaactcagctcaggcatgacttggtgggccaggggaagctaaggatatagatagggttataggtagccacacttacctatagactgtatgcagacaagaagaaagttgagtaggtcagtttatggttttgcaggttttatgatgagacatgatggtggcttagggacagggagactggaattagcacctgctatgctttggatgtctgtcccttccaaaattcatgctgaaatttagttgccattataacaatattgataagtggaccctttgggaggtgattaggccatgaggtctctgctttcatggatgggattaatgctgctataaaagaatgagtttggctcctttgtgcctctctttgcctttctaccttcctccatataatgatgcagcaagaaggctcttgcccgatgctgatatcttcattgtgtacttcccagtctccagaatggtgaaaaaataaatttctgtttatcataaattatccagtcttaggtattctgtcgtagcagcacaaaacagactaaaacagcacttacatggagttgtgcaaccgaacagcttctgtgaatcaggaactcaggcagagaactcggcctgcgttcgtgttcctatctcctcagcttcaacttacatcactggcctttgctatttgaaatctggatttctggagtcaaacataactcatctcgaatcctgcttcagcaactaactagcaagctgcccttgagtcgaagggctactgttgacctaagacgtaatggatgtaaaataggtagcagctggcctcctgcctgatcctgacagccaccattcatttagatccatgagtatttctcttttaaaccaaacgtaggcttctttagcatccttaggataggttgacagttggctttggttcccttttctttcctgggagcatgactctgctgttcacataagcttctcttgtgatcctccctgcattctcttcacaccaatgttgcccagatgaaggggccacattgaggggagaagtgggctgcctgttctcccctcacacagcaggccctaggcttcctctctccctgcacgagtacatgtggccaggctagaacagagagcaccctgcctcacctcagagaacactgacctcccttcccatccattttaaataactggcagttcagcattgcttcctatgggaaccagcacagtaggattgggtccctatagcttaacatacagcacagactgtggaaataactcaatggaggtgaggtcatctgagttgacatcccagttctgcccataactccatgacgtccaacaagtcacttgactttcccgtacatcttcttccgtatctattcggggttcagccatctgttacctactacatgccagcactgacaatctaggattctgcattgagttctattttaatgcccctggaggtggtgttttttaagctcagatgtggatttttatagcactctgcatgtagggtgcctggcacctttaaaaataggaccactgccatggatgtcgaggaatagcgggagaggttccttgtgagtcatctgacagagacacttggggaacattgagaaaggcttggcatcactgctcagaaggagtggctgtcttcccaccttgaatttggatctgaaatataagcaaatgctcctgccatggtggctgctggcagctggcactcttggtgcccagatggagatttccagctgagcctggctctagaaggagcccaaactgaggcagcctgtgatacccctgtccagtggggaccaggtagaggggaaaacaggtggatcatgagttgctgatctgacccctgccaaggcttcctattcttaaccagatccagggcccatcacaactggaaggaccatcacaactggaaggaccatctaactgggtctcacaattgggaagagcatccaagttagacatttcatactgtttctgagctacaatcataggagtgaaagaagacatttatcccccaagtttaagcctgtgtcctattattgactacagtacttatagtacatttgcaaattattttcatacattctatatttatgaaattgtgtcatttgaagcaacatggataagactggcggtcgttatcttaggtgaaataagccaggcacaaaaagacagatattgcatttctcatttatatgtgggagctaaaatatttgaacacatggaaaaatagtggaaaaatagataacagaggctaggaagggtgagtggggggaaaggggaaggacgaagggaagtagcttaaagggtacaaacatacagaaagatagaaggaattcattcaatgtttgatagcagagttggatgactgtacttaaaaaatgcattgtactcagatgttagacaccttaaatgccctgatttgatcatcacacattgtatacattaaaaaatttatcatgtaccccataaatttgcacaaataaaaaattgtgtaattatctgtgattaggacaattgtatctcactgtgtataataaaacaccactttgtaaatatagacatataaaatattctccagttttcataaccttgttttggcatttcttaattattgttaacctgttgggaaccttaaaatatatgagtagccaatctttttttttttcaccttataggccaaatctcagctctatgccttttttccctcactctgttagattcaaacagtgacgaagaaagtcctggttgcaccaccgccggacgaggaggccaacgcaaccagcgctgttgtctctctgttgaacgagactgtgactgaggtgccggaggagactaagatggttatcaagaagggcctggagttcaaggatgggatgaacgtcttaggtaggccagctggtggtccgggattctgcttccctggcaatggctgggctatcctgcactcccttttcagaaaactgatgactcagctgtcctctaggtggagcaggaggctctctctggggagcaatttgagggtcactgggactgagagctgagcgatttaaggaagagagagaagggcagaggagaccataaggggacagggcagcaagaagctgggtatgggaaaaaaggagggagctcaccgtcattgggcacattccctgactctctgtgtggtgttagaaagtcactttctctgactctctgtgttattaagtgacacatccattgctttcgtttcttaagcattttttaaaagctgcccccatgtactggtgctgtgctaggtgcgggggctggaccaccacagcccttagtctgcaaacaaatgcaatgctaccaggattgtaaagtgttggagtaggtaccaagggagctttacagattatcttgttatcttgttttactttctgggatcccagtgagccctttctcctagcccagtaccttcttagcatgccatcctagaggtttttgggctctgcagttgggcagacctgggtttggatccagtatgggccacttactggttatctgaccctgggcaagttactccatttctctgagcctcatttgtaaaatggaaataggattggcatctattttgtagattactgtgaggatgaaatgtgattgtgcatatagggcacagtagcacatgccatgtgctctctccgtatgagctgtgatcattattcaaagtgggtggagagctgaggagttcagtaagaaaatacctccatgagggacagaggtttattaccatgtgagcggctctagtctgcccagtttgctcccctcccactcagtgggtccactcccttccgtaacctccatccatcactagaatggtgtccccgagacaggaaataggggcatttggccaaaacctgggagaaatggtgaatctggatggatgaagtatgtttatttatccaagcacaatttctaaaggtttggatgacagctacttagagatgaatgagctcagtagtcctttcacgttgtcatctgaaagatcacatggccttgtctccttagttgggttgtcagataaaatacagaatgcctggataaatttgaattttagataaaaagcaaatagttttttagtgtaagtcacaaatattgcatgggacataataatactaaaaaaaaagtattcattttttacctgaaattcaaaaagtaattgagtgtcatgtttgtttgtttgttccaaatttggtaagcctactccttagccatctagaatggtagagagaaagaggagagagagggagcagaattgcacagtcactgagaagcagaagcagatcttttttgtttggcttggcaggaagcaggttggatgagtgagagtgagggaagagatgagctgactaggttgctgggcaatggaagatcaataaacattgtttaacaaccagtgggaggtgagaggtggaaggagcgaggagtaggaaggagagttcctctggggagattttgcaaatatccccagcacccaccaccgagcagctcttctccctcactgtccagctatctatgttcctttcaggtccttcctaactcccccatggtcttttctggtgggtcataacttaaaacacccaacccccttttgtcaaagtgttcctcagtcttctccatactcaggaggagcttgaggccatgaacaatggggccagggctttggagtgaatcattcaaagactttcctggttgtttccagagtcttggtggattctgggaagtcacaggacctttggctctactggggagtttcaacacaactcactactctgtaaccccagcggccaagtccaagagggttttgttcagatgcaacacccccgttccagtgagcaatttcaattaggcaatgtttacaaagaaaaattacaagctgaatacggtttccatccaagtgcagatcaaggctctggaaagccaagggaagttagactgttgagaaacttcccatttacaaatcatggctgaaataaggttctttccacggtcttctgagggtggagatagtggcttttttatttgtttgttttgctgtctttctgttttttggctttggaaagtcccgaggattaagcacttgcaataagtgaagatacaaccccagctcttgcctcccacttctttaaggaaccatttctctcctaaaaaacctccagaaacaattctggtctccaccctctcccaactgcttaaatcaactccaactgttcctttaaaaacctatctctcatagatatggccagtttctgctgacactgaatggagctttttttattccagttctttgggaccttgatacctcgggcattttctcttaatttcaaatgaaattaaccaagtaatatgagctattctcagccagaatattcagattgattctctttgacctcccacgtagcagactcctctccatgggcttgagagaaggacttgggaatggcctgaaattgattttgtacattactgcggaactagttccctctgtcctggatctaatcttccctaagcctttgtctttccagaccaataacttacttgtgaagtcatttgtcaagctttctagctgagagcaaaaagaggagatactaaatgtgaagtattagtaaccccaagtgcaagtgatggattctttttgctgaagatagaaaggatccagcaaagggtagttagacaatctgggttgatatgtgcttggtgtaaagaggttagtgggttagatgactagggaaagagtaaagtcaaaggttcagagagaaggaattttgttataagagaatcaaattataatgctaaaatttactgagtatgggttaagactttaggcataactggacaccataggaaactggatataatagggagggactggaaattaggactgccaaattgagcaggttaggtgtggagaagaggaggaaagagaagatggctcatacttcagagtcagagaacaagtcaggtggggaagcaaagtcctgtagccaaggacatagcaacactgatttatagaacatgtaagtagtaagaactgagacctcaagaatggcaatactagatcaggggtcagaggtcagggagcacatggggattggaaattagaaatccagatagcccccaggcagtactggaaacacctgtaagccgcacaatgtgccccagtccctggatgcgttggagtgagactgcaggcctgagcgtgaggtaccgagggagagaatggaagggaccaacaggagtggtaggaagagcaaagccaggcctagccttggaggaactaaagtgtagggcagattcccaggatctcaggcacaggggatgaggtaaagccaacacagaagtaagactcatggttgggtattggagttggtccaagacctagtgcaatgtgatgctgacatgaagagggcagagatgaagctccttaaatctttcctggggttaggattgaccccaaaggctgatgtgaggctggacttagatacaagtcaagaatgtcaagtaaaggaagaaaagagtggagggactaggaactagcaaaatctgacagtgaatctatattctgtctttatgatcctgaaaaaataaataaaataaaaaaagcattctaaccatttcaatcatgaaaataattatgacaaattcataaataacagattacatttaaaaaaactggataaaatggaatttcggattccttattgttttccctttgatttttcagtatttttttctccctgtcattttatgtgtgtagtaataaaaaataattttacatataggattttgtaagagtgaaacataccagccatgcattgatttgggataataccaaaacaagctagatgtaactctagcaaagaatttattggctaattggcctctgctattccaatattggctccaaagtttgtatgataatccccaagtcccaacaggcttttcctcgttaatctgtgtaataaaggaatctgcttacacatgatttcataagtgaggggagggaaaagagagcaccttttagtttggaatgaaaatgaatacattttcttcaaggacctaatgctgcttacagtttaacttgctcatgtggaaagtgttcaagaaatccaaaattatccaggggaaagttacattcagtatcaaatataatgctttgttcttttaatgtctaattcatagggtaaccagcagtgagaacatggctccatacattgggaatggtaaagaatgagggagaaaaagtacattttttgtaatttgtccttctatgtaatgtgattcatccaacaggtctgatagggtttttcattgcttttggcatcgctatggggaagatgggagatcaggccaagctgatggtggatttcttcaacattttgaatgagattgtaatgaagttagtgatcatgatcatgtggtaagtggccttgttcttacttcttagcagtgggttgagaaagccttggggtccccagaggatactggagctctccctgcaggaaaaagttggcatgggctgatcaaatgtctttccagaaagactttgagaaagggatgaaaatatcttttttggagcttcccctagaacaagtgtagacaaattatgccccttgggccaaatctaacctactctctcttttatatggccagcgagttgagaatgggttgtatatttttatgtaactgtcttagttgggttgccataacaaaataccaaagactgagtggcttagaaacaacagaaatttctttcttatggttctggaggctggaagttcaagatcagggtgccagtatggttgggtctgataaggggccttttccaggttgcagaccaacttctcattgtatccacagttagaaagatatttatttatttttatttgaattttattctattgtaatttttttgagacagggtctgactctatcacccagactggagtgcagtggtgtgatcatggctcatcgcaggctcggcctccctcactgtagctcaagtgatcctcccacctcagcccctcaagtagctggaactacaggtgcacactaccatgcccagctaatttttgaaaattttttatagagacgaggatttcactatattacccaggctgatctcaaacttctgggctcaagtgatcttcccacctaggcctcccaaagtgctgggattataggcatgagccacctcgctcagcatgaaaagagattcagaaagctctctggggtctcttttacacagtcattgtctttccatctattataacaaaataccttagactgggtaatttataaacaataggaatttattgctcacccttctggaggctggcaagtccaagatcaaggtactagcagatttggtatctgtggagggcctattcctcgtagttggcacctttgtgtgtgctctcacatggtagaaagggaaaacaggctccctcgagcatcttttattaagagcactaattccattgaagagggcacagccctcatcacctaatcatctcccagatggttcacctcttaacaccactgccctgggaattaagtttcaacataagaatttgggggacatatgaattcaacttatgaattgcagtttttgccattactttcaatgggaaaaaccacagttacttttgcaccaacctaataattaacttgcctaagatgattatagctagggagaggaagagctgtagttcatattggtatcaaaacccttgatgcataagcaggtaggttttttggtttggatcgtctaagcaatattgtttcccctttatttcacatgtgtttatagtcagtgactctgaaatctaggggagcctaggagagcatgagtatctattctctcattgtggaagctctgtcatcttcaatcattggaaacttttggtgtcccatatccatcagacagaaagctttttacttgcatttgtttcagatctctaggatggtcctgtatgtctgcctagaaaaaaataaaaccactcttagaccaagtcatacctgtgttctcttttccacaggaattctgggttacctattccccatctctgcatgttccaggcctacccaccttctttgccaaacttcttctgatccttttccacttttctgtaggtgtctttcgtggaaattccagctgctttttctcttcctccttttcttgtctcccaccccacctcacaagggcaaaaatctgttcttttttatctccacagaaccaaacatggtgatgtgcctgtagtcaattgttactaaaactttaggaacgagtgggatagctgataactccaagatttcagatcaagaagatgctcctcactatttcatgaaccatatttaacagacctggcttgttcagatcattgttttacggtgcttttaaaacacagaaaggatgctagtgaaataacatcatgttctcttttatgattgtactgaaccctcagcttctcaggcaattctagatttctggatatttctgttgtatgaagatttgggaatatggtggtgttgtaaaacatatatatatatatgtatatacacacacacacacacacacacacacacacagagagagagagagagagagagaaagactcgccctgttgccaggctggagtgcaatggcacgatctcagctcactgcaacctccgcctcccgggttcaagtgatttttctgcctcagccttccaagtagctgagattacaggtgtgcaccaccatgcccggctaattttttgtatctttagtagagatagggtttcaccatgttggccaggctggtcttgaattcctgaccttatgatccacctgccttggcctcccaaagtactgggattacaggcatgagccaccgcatccaaatgtaaaacatattttttaagtccttcagattcatctgagtctgtcgagactttagtacacaatgcagaataagtctcttgcttaaacattaggattttccattgtttcctagaatttctagcagattacgcatctttacgccaaacatgcagcccgtatttctgtaatatgatgccaataacatgggcaatgtatgtgtccttcctatgtccataccaatgtgatttccactaaacccttgcaggaaagggaatcttctaggacatcagatgagtctgtgggatgaagtgtagcctcccttctccccagagatggagggtggtggtatgaattaagaagtttcccattcactgaaaccagaactcctaaatacttattatcatcttgggaggtaaaaagtggttgtgaggcaggaataagaccttagaatgatttctgacagctgtttggttacctcatctaggctcatagtcaggacaatgtcacatgacatgagatgccaattctacacatttctttaattctttcactgcctcgtcagcatcagtatttgctaatgatgtgtgtaaaaaggttctggataaaacagtcaactactctttaactgacccctcaaagcttaaaaaaatcagaattcttttgtattcttttctatgtagcagttataatagtaataatagcagaatgtaacattgaaaagattataataattctttttattattaaattataaattagaattactaacttcttgctgtatgctcagtactatttcggttacagtacaggtactaacccatttattactgaggaaacaattattattaaataacttaaatttaccaaattcctgctaaatacttaatattattccaattgttttacatgcattagctcatttattcttcacaatagtactgaacaaaaataggtgcttttgttaacccatttaccaaatgagaaaactaagcacagaggttgacttgcccagtgttatggagctgtacggaagtgatacctacatcaatttctttttgacttcagactggattgaatccaggatcctcctattgcaagttgtgtgactttaggcaatttagacactctaagccccgatattctggtgtgtaaaatgggataattctagaatccaggccataggttgctgtgagaattaaggctgtgaccaacagtcatgaagcaccttctttgtgctgggaactgtctaagcactttacatggattagtattatagtaatagctgtttgctgttaccaatattatcatcaattcaatccatatcctttgtatctctgtgttcatgaattctttaagaaacctgaaaaccccttaatttttgtatgattttcgtatcctcattttcttaggtagttatttaaaacatttttttcaaaatttgaaaaacttaaacagaaagtaaaatgtttcataatctcacccctataaaaacataaagtgagaagtaaaatctctgcctactcttccaattcctttttccaataaaccaccatccatccacactgttaaataaaaaactattcaatgacacgtgttaaaacacagtaaggcagattttattcaggatcattgcaatgagcacagggaccacagcaacgggattttggagtgggggagagagattgggctcacttgcaagtacaacatgggtaagtgggaatttatagccatggagcaaggtgggggcagtggatgctcgggggtaaggagtattttggctaaaccaaccccacaggattctagctgaaggccacagggtgaccaaacatcgtccaggagaggatgaagaacctgatcagatttgagggtgatcagattttgaggatggaggttcttgctaacctgacttagatgagttttttgctaaaccggattttataaggaaggtttagcaaagagcccagaagaggccagaagaaggttcagacgcctaactgaagtttggtcaaacaaagaatctttgtcaatccatccattttttttttcattcaataaatattctattctgtgcaggcaatgattttaggtactggtgagataatggtgaataagacagagaaaggttctggcccttgtggagcttacattctaggaaagggagagagggaaagccaaaagggagcaaatggtagcaaattgtctttgtagcacttattattaattcgaatagtaataagtgccgtgcaatagcgagagatagtgatgggggtagaagtgatggcccacgtggtgctgtctggaaaggtgacctttaatgaagacctgcagagtgagccaagcaacctggtgaagaactgaggggagaatattccaagaggaagaagtggcagggaaagccttttgagggtcagaacaaaggtctagagaggctgcagtgtggttggtgaaagggggcaaaaggaagtcaagttggagaggtgggcaggaggcagatcctccagggtcctgcaggccaccttgatgggttggaatttcatttccttgcaaaaggaagtctctggaggaataataaacctggaggctatactaactgcttttcactctgtcttgatgaaaagttctaatccacaaatggtaacttttaacaaaaatcactctttgggtagctggaactcctatccctaaatggattgggaaagatgaagatttgtgatactttctgagcacagacagcacctttcagcaactcttggaatgtgtgtttaggtctattgacaagctattggaaacgtgtgggacagaaccagaggtgctccacagcagggctgagaaagtccctcagcttacctccactccaagtgtctgtctcatcatctgtcccaggcctgaaagtcccaaatgaattattcgagtgggttaagacctcaaagatcctgaagtagttggagctaaggtaaatggtttccagaaggtcaccaagtaatatctgcgtttcatcagttgcagttaagatttttgtttcttgaaatactggttttcaaacagatcagaattacctggggagcttgtttaaaatataaatgccccaaggccagctccaggacattctgactccataggtatgtggtaagcccagggaatccaggtaagctcaggtaagcccagggtaagccagggaattgttaacaggaagctggtggtttctggcacccggacaccgactgaattctaggtagcttgcctgctgtagatgagtgtgtttgtggagccctgcgaggggcatcttaggctggcaagggctgaaagacaaagtaggtggaggctagaatggatacagtagtaagaaaaagactccacaggccagtcctggatgaatctgtggccctgaaaacagagaacaggaacagcctaagagcagcatgggagccattccctctccccaggctctccagccatgtccttctcatgtggaaaatggaccaacaatcactgggcattatttggcttcagaactctccgtggagccctcagcctctttatgcactttgatttgtggttttgattgctggcttcatctcagaagctttgagtggtggccttgggtgctgggcatttgcccatccttttccatggaatgttattttcaattaggtaattcattgatatggaaacccaggaacccagaagtcccagtttcggagtgaaggcctaagttgtttgttttaaaaatgggtgcagttggtcggccacacctataatcctagtgctctgggaggctgaggtgggaggtttgcttgaggctaggaatttgagaccagctgagcaaaatagtgagacctcctacaaaaataaaaataaacaaaaattagctgagaatggtggcaaacacctgtagtcttagctactcaggaggctgaggtgaaaggattgcttgagcccaggaggtcaaggttacagcaagcaatgatggtgccactgagctccagcctggctaacagagcaagactctgtctcaaaatataaaaataaaataaaaaataaataaaataaaaataggcacaagaaagtaatggccctgaaagacttcatagaacaaacgttcttaccttcttctacttaatgctcatcctattcccagagatcaaggtgtttggattagcaagggcttcttcttgccatatttataaaccctaacacttcactttctggcctttgattaacactctccatttacaatgggagctcatgcttttctcagctggctaagtgccccagaggtaaactgttacctctctctagtccatctgtctgtggcccaaatgcattctccaggagactctatagctagtctttttttggcaaagagccttgaaagcattttctctccattctacaaattgctcgtcccaggagagaaggaaaattgaatggcaccccaaacagcttatatttgtatttttctggacatctttaaagggtgcttggtgcttgggaaagaattgatctcttgttttatgaagataaatgctttttggctttataggaaggttcattctgcttatttacagtctcaatgaatgaagtgctggtccctgagactaccttgataatttataagatgtgactatggacacaccagcagaatataaaatggcgggagagctaagggtttaatgacatgagcacaggtttgtctcagactccctaatgtctagggaagcagtcctcagacttgaccagcctgcaccccacggaaaggaaaagtaggaccttcaggctagattctcatatgggaagagagcagctatgctaatgttagtttaactaatttgtgtcagttacagatcagttccttcaggattaggttcctcttgagagaatatgttgctataaaatcatcttgcaattgggtatcccatgagatgttctagaaagcatcactaactcaggcttactaagcatgagtgatgagaggacatggggtacatgtgtgaaaacagaacctacaaggaatgcctttgtcgggactcagagaattaatggtactgacagagatgcgagaggggtttttagcagcacacatatatgaatgctcaaaaatttaatccccacagcatctccatgaggttggagttagccgctctgagccttgacatacatatctgtaaaatgggaataagccactaaccatggtcacatattaataactaataagtggtgagacgagctccatgtcttatgtagtattcatatatatgtgtctcatctactcttcacattttttctttaatccaggaaagtgtttgctccaggcacaattgcaagtctgtatagatcttacaattacagcatcctttcctgactccctgacccctgctggaagccttatctagggacttcattctccccatagtctttctctcaagtatgttcataatttttaataaggtagcagccttcccataaatattttcatatcagccagaaactgtcacaggctgaacaaattcatgccctaacaacaccattctggataataaaggattttaccaaatatgggaagaatatattcaggttgagagagaaaatagctttcccaagagtgaggaccaaagtagtttccaaactctctataaattaataataagatagaactataacatcagtttatataagataaattggtatacgacaaactgcttatctacaaagagctgtgattattcactaaaaagaagtggcttgtcttggttgggaaaatcccccagttgggagtttcacagacctgagattgttttcatttcctggtttcctggtcttgggctgattatttagcttttcttaacctcagtttctttatttgccacgttgcaataatgacacctagattttcgggttgtggtaagcattaagtgagggaatgggtgtgcagctctcaccatagtgcttaaaacaaaatgaaagtagccagcattattgttagaataagtatggaaaaaagactttcagacttagaagtcataaaaccacttttctctaaatgtacattttggctcagatgatttccttgttctctctctctctctctctgtctctctctcatttcaatatattccctatcttcctaggtaagaacaatgcaaatttacaaattccagtttatagttttctaaaaagctcaaattcccaaatttctaggaaggaactgaggaacacaaatcaaacaagattcccagagacacacctgggtctctcaactttgaacttgatggtaaagataaagatggcaatgcatgtctctcctttattcctagaactcaccttagccacaaaatttgcctttggacttttcatcagagcaggcgccaccagatccacaaaacagattttggttaagggaagtggtccaaagtaaaaaataacatgaacttttctcagcaaaagtctttttttgtacagaagagccaagcgttttcctcagtgtgcggtacagaggaggcccaggttctgaatccctaatgatctcttcaatgctgtttttcccttttgtgtttttcaggtactctcccctgggtatcgcctgcctgatctgtggaaagatcattgcaatcaaggacttagaagtggttgctaggcaactggggatgtacatggtaacagtgatcataggcctcatcatccacgggggcatctttctccccttgatttactttgtagtgaccaggaaaaaccccttctccttttttgctggcattttccaagcttggatcactgccctgggcaccgcttccaggtagagaacaaaagaaatcacctttctctttgctcactcttttgccctctttgccatttctcatttctcaaaaccctcccatcacaaagttcaataagaacacttggcacacattactaagatcttttggaaaaggcgaatgatttgaatttttgtctccttctaggaacttctgagccttctggtgaacatttttgctggtttgcaactatattggaaatacgatctcacattaaatttttcagataaatgcatgctatttgtttgcatgcctaatttgccacttaaatcattagtttagttttagatgttttctaaagggagtgtaacaggatatttttcaataaacatttcacctgtgatttggaaaatgctatcacaaaatattactctttgaagattttggtaaatacattttcaaaagtaggagaagcagcttttacaaagtaaatggtatgttaggtgagactttttctaacaaaattcggccaagtctttgacctcgacacgaacctctaatggattatttttccccagagttaacttggcattgatgaagaatcagttccccctttgttacttagttccagtacctagaaagccaaagaggaccccagagatatgtagagaaaaatcattttttggactatcatcttggactgaatctaacaaaaacaaaccaaaaaatgaacaagaagaaatacataagaaacgtcttacaattaggctgggcgcagtagctcatgcttgtaatcccagcactttgggaggcctcggcaggcggatcacttgaagtcaggagttcgaggccagcctggctaacatggtgaaaccctgtctctactaaaaatacaaaaattagccaggtgcggtggggggcgcctataatcccagctattcggtagtctgtggcaggagaattgcttgaacctaggaggcagaggttgcagtgagctgagattgcatcactgcactctagtctgggtgacaaagtgaggctccatctgaaaaaaaaaaagaaagaaagaaagaaatgccttacaattgagaatttttaagactagtgttttactttcagcttgcaatcattgttttatttctgcacatatgtccttgggtcacaaaactaagactgaatcataaaacaggtggcagggaggcaagcaaattctgaaacccatagctcatcattcaggtccttgttgcagaacctgtgcccatgcaatgctagggaggtgccactgcatgacacagcagggcctgttgctccacggctactgagcagtcagtcaggtttcccttaagcgacctaacagaccaataatgccaaccacctgggaagccaaataaaacttccatcttgcaaatcaatgaggattcagtgctagtagaaaatggagtttcagacaaagctggaatatatacaatcttaagggtctagattctttacccagtttccgaagatgaaggaaaacacttcaaaatttccttcttgatttataaattttccatgactaagtatctctatccatacagatcttcacttgaagaaaaagagaaaaaaaaaaaaacccaacctggtttaattttatttttgttttctggttataagcctggtatctcatactttatctcataccaggctcataaccagaaaacaaaaataaaataaaatttctgcaggctcaatgtgaaaaagttcaggcagtgaatacaattttgaagaagaaaatgagctttgccaattattctatcacccagtgataactggtcataaccttttaattagtctttagttatatatctttcaagttcttactatgtatgtatatattgttttataaatagttatttttttactggtcaacgtatcataaaagttgtatctattgcaagagactttactaccattttttaaactgcataataatgcactgtatgtactacaatgcaaaccccaccctgtcctagccacagtgatgtatatttaaggcatgtctattaaacagggctgtgacaaacatccttacaaatacatctctgcaaggttgtatgatgatcccctcaggataagtggaatttcagagtcaaatggtatgcacattgacagttttgaagcacattaccagattgctattcagaaaaatgtattattttatgttcccattaactggggtttgagggtgtgcccatccctgcttgcttaccagctctggatattgccagtcactttaatgctttccagtcctattgggtgaaaagtaatctcatgggatatgcatatctttacttctccttcccctcccctttcgcctgccttgtgaattgttcatgaacttggtcattttcctgttgaggtattcgtcccttcctgattgattttcaagctctctttttgtataagaatattagctcatgtgtcacaagttgcaaataatcctcctcttcacttgacatttgtcttaaaaatttactgtgctttttgcctctagaagttttaaatttgtacttagtcaaagctatcaatacttttctttagaatttagaatttagattttgcttaggaatagcttctccaagttaatacaatatgactttttattttcttccaatacctttatggtttagatctttcaactatttcaaaaatattagtattattttcttttgaatgactagaacattatttcagtaactttataagacaaggtgaatcttaaggggatttgcatggcccaaatttgtatttaaatcagagacaaatgctcagattatccaaccaaggctgctaatattagaccaatttcttcccctaactctgtatttcatttgaaaaaaaaaaagtggttttaatctttagttaaaatgtggtttttgcctggatgtggaatttctttttttaaaaggccatgtggcgtgagtcatgtaccgagaattaactgaaggtttctttgccatcatggtcacagagaagaaaaaaaaaaatgtaaaacccagggacagcccacaaaatatccttcctgcctcctcggcccttgtacagaataaagacgttgagggtagttgaacatcttttctcaatggttccagaggctggtgtcagggaggacagagggagtggggtggcctgagactgacctgtcttcagccctccaacttcagtgcagtctgttaaaactaatacgtaaaaaacaaaagaagcatttcaaatatctgacagttattattagcaacatttgaaggctgtcatatggccattgaggcaggaaccaaaaaagcaatgtcagcatgtcagcccatccacacaggaaagcttgaaattaaaattctcaagtcctagtttgattgggtgggtgggttttttaagacaaaaagcctgtccagtagagaaatagaggatatttttatacttaccaatcatttttcccagtcgacttaattgtccaaagaccatttgatgacattttggaaaaatgaatgcaataataaacataaatgtatgccagcaattcctagtttgattgggtgggtgggttttttaagacaaaaagcctgtccagtagagaaatagaggatatttttatacttaccaatcatttttcccagtcgacttaattgtccaaagaccatttgatgacattttggaaaaatgaatgcaataataaacataaatgtatgccagcaattccagaagtatccttagatttgagaatgcttgcaatcgagaatcctggccaccaaccacaactgagcagtcatctcataccagtcctggtgtcctggcaacccttcgaaagggcccaggaaagggtggggtaagaggaagaaagggacactgacttctcattaagatagcaagctaggtctgatgccatcccctgcatgcaaatgaggccaggctccaactttgccctgggtttgcaagattttagttatgagatgtcccccaacaaacaattcttcttcctaccccagaccaagaaggaggcatgagacagacccctgacttgaaatcacaaagaatgttctggtaagagaaatctggctctcctaaggttgttttaggagctcgtgggccagtggtttgataagatgcacatctcgcatccctagttttagggcttctgattcgttggttctggataggccctggaatcttcatttcatttagcttccctggagcagatggtcttctcccactctttgagaaactaagacctctacagggatctatgtccagtttggtcactaattctgaccagtagaaggaggaaactttgacaaaagctgtaagtgcaagagagaaaacacctccaaatgttatctgcattgcaggttttctaattcactttgctaaagtttgaatagaaaaaaatcaagaggatggaccatgaagcacttccatggcagtttgagtgttctgcattgctttctacattacttaaactttgcagcaaatccactcaccctcccaggcacttctatccacatggaaataatattctggcctttagcaacccttactgtttattggtctccaattttgaagacatatgaacgtgtcaggaattctggccttcgaggcttggtcatgtggtcacgaatccacatcccaggcctgggaggagtgggggtgaagtcccttcatatttagtctttgatttgctaatgagcacatgctttcctgctccatgtcattgaagtgactgtagaattggccgatgagcatatatcagggtgttggactatctgtgaggttccccagtgaattgcttgaagctcaggttcatgctgaagtgtgctggacatgtttgttgttatggaaattagcaagtccagctcaggacaatttcccagggctaaatgcaatccattcagtcattttatcggaaacagcatttctagcatgaaattatgggttattcaaaaattcctcatcccattttgctgttgatagctgattcttttctgacatagctggcttttgtttttttttttttgcaacccaattaatatgggcaatcagatgcacttcaatatcgaatccaaggtggaaacagtggccaaaagaaaaaatcttcaagctctgagtatatctccaaaaccagaaccaatgaaaatattttgctgcctattagtgtcttaataagattgaatttgagcctccaactcacgagtttttaatctggctccagatactgcttttttgcatgtcacattgcttgattgacacaaaacaagaaaaactaaggatgcagtggcattccagtttatgcattgtcctgcttctctaaagtggacataaccctgtctctctctttctctttgttctcagtgctggaactttgcctgtcacctttcgttgcctggaagaaaatctggggattgataagcgtgtgactagattcgtccttcctgttggagcaaccattaacatggatggtacagccctttatgaagcggtagccgccatctttatagcccaaatgaatggtgttgtcctggatggaggacagattgtgactgtaaggtgagaagggtggggtaaaacacaaaacaacctctaccctgtttcccctccacactaactccatgtgacagaggccacttgaatttcatttctgctggtggaagacaatgaaggtaataaaaaaagagaaactattggcagccttcaaaaggaaaagattgtgacaagaaagaagactcttattaatacctcctgtttgtattgcacatgtcaacttgctttagaaattggatattatttgatttttagcaatcctgtgatggaagcagggtaatttctttgcccatttaatagacaaagaaactcaggcaccaagaggcatggtagtttgtccatggctacagcatggctgtaagtgaggccaacatcagtaatgatttggcaggactgtaactgaggccaacatcagctgactctggatccaatttttgtttcactgaaatatgctcccttcaatattccatcaccagagggtaatggcagaaattacaaaatactggaagagattcctcaatatgacatataagattttattacaaataaatagcacatagttttgtttttactaaagctatttttatttaaatgtattcatcattttaaaaattcagaaagaacattttcctaagagattgttaaaaatgcattgcctcaccataaacttaaagatcacacctactagccaagccaacactctgtttcttgcttataggttaagtcattgaaaatatcagtcttcagcccattcaatgttatattgacattacagcatgaaataaagctttttgcaatcatctttttaatattatcactcccaacccatctaaatgcttcaattaagccagaagccaatttctgccttatgtcatatccctactctcagtctcaatttcctcatctataaataaggaaggtattcataatttggggctaaaagttggtagttcatggatggactcccagcccagagtgttgctttgtttgccttgaaatatattgtaaaagattagaatttcatcctcttatgagacagctgcccttcagtttcccacagtctcccctgctccctattacttatgcctggcctgctgcacctgtcaccacagcttagccctttaagacaacggagtttgtcaatcttggactcaacaatttataagttttatttcccctctcagattctatgtgatcagaaaacatagggagtaagtgggtaacattctgtgtgacagatgtacttgtagtagaaagagaattccagatattagaacagccaaggcctgggtgattcactttaggaaatgaatgaggtagacactggaatacactttcatcctccatgatgataatcactccactctttggttcctctgagatggcggactctttccatacattgctttgaacatgcccagcagtcctgaagagaaggaatagtcattattcccattttacagaggaggcatgtgaggctcaaagaaattatctgacaaacctaggtctcatggctatgggtgccagaggcacaagtcaaatttctattccacagtttacctcttccaaccacaggtcatttcttctttctgactgtgactcaaaaaaagacattagaatagtgtttttattgactttttccattgggcattagaaggggcaatagtttttgggttcaggctaaggcactagcctctttctcccacttcaaaccccgggcagcactgtcaatctctatattagaaactttggtaataatctggtgtctgcttggttcatgttattcaacagcccattctctggtaggcctttagtgggctaaggccattttaggagatctctcctaagaggcagtgttcatttgggtctgatgtctctacatgctcaggctttttaaaagtccaagctcagggaccacccagtgtctgtagcagtgctggaaatttgctctaatcatgtcctctatgtgttctaggggctgatattgccatggaatggccacttcagagcctttgcttgatctatctagctctgaggtattcaaccagctcaaggacatttttgttaaaacacagctttctcctctctccttctaaccattccagaagatttagtgaatatcccatatgcatctgagttcactttagcaactcagtcagcaaatagagaaaagaaaaaattcaccatgtttaatacacacacacacacacacacacacaatatgaaaacatgaaataacaatcacatttatttaatcagctagaatgtatcatctgaaatgtctcccagtggttctcttgctaaattatctcaccttatacatagataaggaaacagaggctcagagaatagatcacacacagccgtctagaggaacaactataatttaagtttccaaatgctggcatatgcttccatttatttaacttgtgatcctagaaacagccctacaaagtagatattgggttctatattttacagatggagaaaatgaggcacagtaagttgaggtaactgggccagaatcatgctgtttgtaacaggcagaaatgggatttgaacccaggccaccttactctggggtttgtgtttttaaccattacacacactgcctccactatactatactgttgggttgcaaaataataatttatatatatatatatatatatataataaaatcttcacaaccaccctatgaattatatactataagggagcctcagtttcctcatctgcgtaatgggaacaataacaaattctagggtggctgagaacatggtgcctggcttatagtctcttatgagtatgagccaggcaccagtcaataaatgttagcttctattattattattgatgtctaataaaatacacaatactcctagaatattaaagaaaaatgtggctgtgacatcatgagtaccatgatgttactgacaatggaaaatatacttcaggtcagaagatcaagcctttcaaaattatgtcctaacagatatcacgagactactaacctcccttgctttaaaactcaaagatgaaaagggcttcttaagcaagtcttttgccaagcaaaggtaatttctggtatctcgactcttggtcttgatggtaaccatattttccattaagttcccactattagatgggaacttacagatgggagaatggaccagtgagtgattgaatttgtgcttaaattctataaatttatctacacagggtttgttttatattaactgatactactgagcattttcacttgacaaaagatgagtttgaccatatgcatttaaatctctggcccctgggtgggttcagtcaaatcctcctaaattgtagacaccacaagggctacctctggggcacccaccacgggtgtatatacttcatgcctgcagtttgtttggaggaaaatagccaaatctatcttcaggctgcgcttccaagtaaaattttcatttctctcctttcactgcatgtaggaaaatagtgattagaaattcttagcatttttattaattcatagaattttcagtgtagggagggatcaaggccatcaaggacaagtgtggcattgaaatcaagcagaccagtgttcaaatcccagcagaccatgttcaagctgtgtgacctaagtttctccacccatcctatctgtgttttcctcacggtgaaagcaggtgttaccatatatgtcccttgcagggttactgtgaggttctgctctgatattgtgtgtctagtatcttaacagcttccaggaaccctagagaagtgagccaggggagtggaaggccaggcaaagcagaaggcaatgagggatgcagggaaaatcactgcccaagaagctcttgcagggcttagaattccacacacagagacagtgcctaccggagggtgagggtattattagggacaagaggggaaagcaacttccaggaagaattatctttctaagactttgtctcacacaaccaaaggataaccagataatgttaatgttaaccacagtgcaaagggatgtgcaagagtgactcagagcaactgatgctgtgtataaaacagtcaaggtcaagactgttggaacttggggagttccccttccctggtgttctgtctgtttgggaaacagttgagaattcccatcttccagctttcagggctttagggaagttttcattgcaaagcagcctggtcctgtccagatttcttgataagaaaaacaattcacattcactgggcatggtgggggtgggggagttgcaatgtgcccagcctcttgtaagtgcattttaatttattagctcctgaaagcttctgaccaccccatgagagagataccattactatctcctttttacagatgaggaagtcaaggcacagggaggttaagttgcctgtagtcatgtggttaagtggcagagctggaatttgaactcaggttgttcaactgcagaactttcacggctgagcactccacactgtacctcctgtgacccagatggattcaaggaaattggagtgctctgagccttgacaccatggacggggaggggaagggtgtggttggggggtctgtagatcacacccagggcaagtgtctatgcaaggatgggcctaaacctgggaatgatggcaataggggaaaaaacagctcaaaccacaggctctccaggggccttaatcttccaaacgtaagattaggtatattcagcaataagaccccaggattctgtgcttggtcaactgatggcctggatttagttgaaacaatttgagaggctgcctctcagctcataaaatttctagtattttataactacaaagaaagcagtcccccttaccttttggcacccacaaaaacaacttgggaatccatatttccaaagtactcttggatattttgatatgacattttgatatgacagctttgtacaaatggcatctagaaaagaggaaaaagagtcactgccctttgccagaccacagagactccctggtgtcaggacagggcacttgaactccagattaaccctctcccagagacaaacttcaaaacggtgctgggtgtggccctggcattgcttggaaagaactgatgagatgcttcagaaagaaagccttcctttctttcattatcatttcttggcatcccctttctgaataatgtattttccagcccatggtgaggcatccaggcgcctgacgcttagtgtcatttggaatctgttgatttgtttccctgatgtccaactcagttgggtctggatatttgctattctgagttctcatgttaaccttggcaatggccttcttagacccttgccacatagtccaaaagcctctggtgctcacagagacataaaagcgtaagcagaaatgaatgcagttgtgttcccatgggaggattaagggtgatttgtttttatctttaatatttccttgcctgcttttagagccacgcttgccttatttgagccctgtgatatattagactaaccggatagcatcatgggaataaggctccagtccatgaatttataagcttacatcatagttgagcagtacccaaataggccttaatccttaattccttggtcttagtactttagatttctctattccttggtggagagtatggggtgggggttgggggatgaattttatggctgcaggaaaattagagcttaaaattgccagggttggttttgctaagattctttccatttccatgacctgaacttctctgttctcatagcctcacagccaccctggcaagcgtcggcgcggccagtatccccagtgccgggctggtcaccatgctcctcattctgacagccgtgggcctgccaacagaggacatcagcctgctggtggctgtggactggctgctgtaagtgtctgtggatggggttctgctgggactgtgagtactgcctcctagggatgcacaggtggcaaggttgcaaccaagatcttagctaatccccatggcaactccctcactcttccttcctccttcccgctcacatttactgaggacctatttgagaaccaaagaagaaaaagatgaaatatttgaaggcgtcacagtctagtggaggaatcagagagattatgacacaaggttaaaagtacagtaataaggaaccagctactgatgcattcaaagaatctcagaacattatattgaatgaatagagccagaaacaaaggagtatgtactgtatgattccatttatatgaagctctaagaaaagacgatgtaccacatatcaatagaaagagatcagttggggctgggtgcggtggctcatgcctgtaatcccagcacttgtggaggccgaggcaggtggatcatctgaggttaggagttcaagaccagcctggccaacatggtgagaccccatctctactaaaaatacaaaaaattagctgggcgtggtggcatgtgcctataatcccaactactcaagaggcggaggcaggagaattgcttaaactcgggaggcggaggtcgcagtgagctgagactgtgccactgccctctagcctaggggacagagtgcgactctgcctaagaaaaaaaaagaaaaaagaaagagattagtggtttcttgggccaggtatagggggatagagattaactgggaaggaacacaaggaaacctttgggagtgacagaaatgttccatctgcacaggtatgcacaggtgtctacatttgtcaaaactcttcaaaacacacacttaaaatgggtacgttttgttgtatgtaaattatgcttcagtaaagtgattaaaacacagcacacacataaaagcatagtgatagagagaggccttcatcccagtcaagaatggaaggacagagcggagaatatcaagaaacatgaaagtggttactgaatttgagtgttcactaggttccagctactagactgagcactttacatcttcctctttaacaaccttgaaagttaaatgttattattcccactttatagatgaggacactgaggtttatagaggtaaagagacttagaaatggacagatattcgaccctaggtcaggctgcctctggagcctgacaaattcttgtttatggtcacattcaagcttctaaaggcagtggtagctgagctgaatcataaccaataggtaaaagtttctcaggtgtatgtagggagacggggagacaggacattccagtcaaggccagcctgcacaaaggcactgaggctaccagcagtgtgaggatgtacaagtggtctggtactcttggaggcagggcgtggtgaaaggtgagcaagacggacatcctcaaaggccatgcagagaaacttgaacttgaccatgtatggtagttcagctacctttcccagtgaaggacattttcctcatgtagaatactcactgcccattcacaaaggtgggaaagtctaaccagatggtcttcgacaagggggttggaatggatcccctctaagtgcccacttgggcttggatgttctgtgagatgtaatctgatgcctcctgtccagcactggagttaaatgatagggcctccggcaatgccagtcttcaatgtcagaggcacagagtgacaagtgctggcccagagtcccaaggccaaagtgcccacacttatttttcaaactgcctgacttgccagtagcaaattttctgacatttattggcattgattttaagagccagaaaccacatttttcttttttttcagatggagtcttgctctgttgcccaggatggagtgcagtggtgcgatcttggctcactgcaacctctgcctcctgggttcaagcatttctccggcctcagcctcctaagtagctgggactacaggcatgtgccaccacacccggctaatttttgtatttttagtagagacagggtttcactatgttggtcaggctggtctcaaactcctgacctcaagtgatcggcccacctcagcctcccacagtgctgagattacacgggtgagccactgtgcccagcctcagaagccacattttgtggacttgagtctgtttctgcttcccactcccacccttccaaagagaggaaaatgcaagtggccgaagggaggaaggacagctgggaaggctagaaagaagcctgacttctccataagatgtgcctgctgttggtgcagacaacagggcttaggttagaaataagaagtgcccagcactttgggaggctgaagcgggcagatcacctgaggtcgggagttcaagaccagcctgaacaacatggagaaaccccgtctctaccaaaaatgcaaaaataattagccaggtgtggtggcatatgcccgtaatcccagctacttgggaggctaaggcaggagaatcacttgaacctgggaggcggaggttgcagtgagctgagatcgtgccattgcactccagcctgggcaacaagagtgaaactccatctaaaaaaaaaaaaaaaaaaaccaaaaaaaaacagaagtaagaagtggctccctgaacagaatcagttcaacttgggagggctgcaaggaaggccatagattttcctgattggctccttcatcatcagaaaatgctcaggaaatacctttagcggaaggtgacaagcaaacaaaatagcctcatctctgtctctgccagtctctcaggtggtggtagtggcgtccctacctgctagcttggttattctctgtgtcctatattggccccaagggacagcctttctcatgacatctgttcagacaaggcagctgagagtcaatggtggtgtatgggtgagaaggattgtgagagaaggggatgaaggatacaaaggaatggggtaggccatggatggaagggggacaaaagggaaataaagacattggcagtggtctagagacagagcaaatagtagcagctcaataaatgtgagctactcttaaccacatagttgctgtgtgataattgggtccatccacatgaaaagaaagacgaaggaagccatttaagttctgctggctttccccatgacttgttgcttacttaaacccttgactctttgcctctcaagtcttttcaatgcttgtggtcattgagggtccctcgcctgctgtgacaatattgcctcatttttttcttgggcttatttccaaggctttaaaccaccattagaaattcatctttttaaaaaatattattatagaggctgccccccattataatacaaatgcctttgagtggaaaaaaatgcactaatatgatcaggagtgaggaaaaggggtgatatttggtgggtactgcaatgtctttacatctgtctccatttaatccttaaggtgccctatgctgtatttccagatgagaaaactgggaatcagaagggttgagtcttttgcctgatgcacagcagagcttgtatggccaggtcaggacacttcacccaactccacacagcctcctaatttgtactaagtgttctaacagtggggaggaggagcagagaggcccagagttggaacggttggagaagacacacttattagggccacccactgggctatggtttgaatatttgtccagtccaaaactcatgttgacgtttaattgccattgtaacaatattaagaggtgtggcctttaaaaggtgattatatcgtgaaggctccaccctcatgagtggggttggtgcattataaaagggtgaattcagccccttcttgccctctctttgtctttctgccttctgctatgtcatgatgcagaaagaaggcccttaccagataccagtttcttgatcttggatttcccaacctccagaattctgaggaaataaatttctgttctatataaattacccaatctcaagtattttgctatagcagcacagactaagacacacctgattctgcatgctaaccagagaaatatttttgacctatttttttcttctctcagcatgaaaataaaacaaataggctcaatgaggacaaatggggtacaatcaaggtcttggccacccttagaattcaagtcttccagccccagtgggtctgccattgtaggtcctggtccttggcagtcacttgttttcaagcctgttggatgtgagtcacttcatgaaacattcaaaaccctgcctacttctgacctaaatgttagcaaatgaaacaggagggctgggccctcccagatcaccccatgcaggtgctcacatgcttacacttgcaaaggaaagcagagcgtcctaactccagggctgaagtgtgtcagcagaagggagttggctgaatttttttttttttttaaaaaggatgatacatttggattaactatgttgatgaaatcatataatagaaaaccccatcctaggctggagctgggaagaaaggagcaaatgaagagctgttgtccagttctggggctctgatctcaaatggagggaggagtgtgatcaagggaaagagagtctaagaggcaggagccctcagtctgagctctgcacttactatctaaaggaccttgggcaagtgactttctgagcctcagctacatcatgtgtaaaatggggcaataacatatcaggttggaagcaagagtctaggttcaatgcctttgagtgcccttctagttttaagacctagagtagaattctgctggggatgaatgtttgtatacaaataagcacgagcattccttttaagaggaaaagaaaaaggaagggtagaggatcctgggaaaatgtgtgtagctgtttgtagctaggtcagatctgctttgaattagtaatggtggcacattctttctcaccagcaagaggagttctggaaactagctcttggttgtgagctctgtgactattgggtgctcattagtgtgtaagtggtggtgggggctaagatgagatggggtgcaactggccattccctagataagtagtctgtggaggaaaagcagagaaaaagaaaagggggaaacttcacctctttagccaaggtttgtaagctttcataactctagcaatttttcaatttaaaaccaaacaaagcctacagtgacatttaatgtgtcacagtgtttgccaactgctggagaccagccagcctcattactgccctctaagccctggatggttttcaacaggcaggcttagctgctctgtaaatgtcatggtgaaaaccaagattctggagccctgaaaaatgccgagtcccagagcactggatgggtgggactgtttaaaaccagaaccttcccctgggtccaggaagccctttgcgtcaggagcccttggcagatatttatgagaccttgctgacaccccagtgtctctgaaggaggcaggatggagtggtaaatgggagccaataccaggaagaggtaataaataactgtgtctggctacaggtaggaaaaggaaaatcaaaataaagtgaaatccgagtggacctatggcctaattctcacataagactctgctagtgagatcttttctgggctcacatgtgctaattggggaatatagttgagacggcacttagaaggaagacctcaaagagcctccaccctccaggagggctctgaagctcctcccaacagcattcctctctggagagaatagagcattcattctcaaactcgagcatgcaccaaaatctcccagagatatatctgaggtggggctggagaattgacatttctagcaagttcccaggtgattctgatgatgcaatctccagggactctcccttccagaagcaatgaactagagacggagaaggaaaacaggagtttctgattgtgggtatatgagcacctctacttttttttgagttaactcttgacagttgatgcatcctttcaaaaaaatagattgaaaagatacaggatgcaaatagctaatacttagtgagtgctccttaagtgttagatattgttctaagcactttacatgggctcgtttgaaagtcacagcagattatgaagcaactaatagtattatcattgttttacagttgagaaaacaggttcagagagaagtaacttatcccaatttagtggatattaactggctgaattggggttcaaacccagatgatctagatatccttgggtgttccaagcatgctcatctgagttctgctgttttaaaaatttgagacacacacatgcacatgcacacacacacacacacaaacttaactaactgaccctccactcatggctggtggaaaacaaaactaattcctacgttaaccttttctttgaagattttaggggcttatgtctatcttagtcttttgctttgatttcccacttccactgaattctcttttttacatcttatctccggtctacatcaacctccccatggaatgtggccccttttccactaagtcctttcctctctcaccaaagtttctctgacttgaggcagcataattgcagatcaaggcgggatggggcagggctatagttctgcgcagcaaaatcattttttgatatatcacaaaataaatgcatgttcatagcaaagggaaggacaaagttcaaaagagtaataaaatgaaaaagaagtcgtctccccttcatcgactgttgaatctcaagtgttatttcactgttaataatttcaggtagcacagacataaaataaaaatgtaatgttaggcatctccttttctaaaaaatcttttagtattccccacccctgggaatttccccttgggactccttgttctccatctttgaatatttccccagctctctggacacccctctccttttcatctgtaaagtaatctgagctctctgtgcctctctcctcatcctgctagatcatggcctgcatcctgactttttaccacgaaaatatctaaccagatgttttactaaacaaaaaccaattgtgtctctagagctaatctgctttcaagtcttaaattcacaatccatcctggtcctgccccttccacataccagcctccccattctcccctgcccagcctgtgccataagtaaatgaaacatagtctcagtcctcaaggagcttatagtctagtaatggggtcaagaaatcccaatggagcctcctaggtgcaaaaagaaatggataaggtgtagggaggaataaaagagaaaatgctctgatccccttttcacctggactaaaaatggtaatataatgagaagcttcttctgggtcatataagccttttatataaaacagccttggtggaggacctcttggttgacaagcactcaatacatgttagcagttattatcttctcaacatgcttgcaggtgagtatccctctccatatgttacgaatgagaaagctgagcaggacaggctaagaaatctttaatgcttgagctgggagtgtcatccaggctggtatccggacttcacgctcttagccaatgcttacgtggatctccttttcttccctaaccccatgtgactttagcccttgaatgcccagagctgtgccagccttcctcgggtttggggcctcaagtgacccctcttccacaccctgcccctaaagacagtcccttcgcaccatgcatcctgagaggcaggtgctatgttttgtttctatcaatattaagttgaaccatatgaaattgccaatatttgacctttttatatggaaataaatggcaatttcatatggttcaatccaatgcaagacaccagatgaattgtgggtgacagctccctcagccctgttcttctctgtgaaccaggagttccagacgatttcacatttccctgttggaggatttagactgagagatgaagatgagagagagtaccttggtacttgtttttctttcagtgaaccagacccagtgactcagtgtgaagtaactcggtcaagcccctctctcatttttggttcctggtgacctctaaagcatagccgtgtcatctgtagaaaacccatgaaatgcaagatctgctttcatcttcatccccttcttgcagtcctgacacacagcgtccagacccaaagatggtgtcacacactctaaaagttgtcttttaccaagccttaaagctcttgagggcaacgcgaaagacagggtttcctgagtggtgagggatgattgtgagagaaaatgaaactctgcctgtgaagaaactttccacacatgaaccacaaactcccatgtcctgccttgggccccagttaaacttccccagagttggtcagacattcccctggcagcctcaagggtgttctgccttgcagcattttcagaaaggaagacccatgcagagcagccatgacctacctcctggctgggcatcctgggaatcttcccagaatgccttgtggcagagaaacctggcatgagagggctctgtattctagtttaatccaaattgacagctttctgtttaacagatcccctttaacgtcctgccttctcacttagaaacctattttcataatcttaccttttactccttcccttctgtattgatggaatacagtccctccaccaaaggaaatggcctttatctccactctggacttccatcctctctgatctctctaggaacctaacttcatcaattattccctcttctctgtatcttcagttacttcttccccaccaacctcttctcattttgatttaaacatgttcaaatattctacctcttaaaacaaaacacaaatttgatctcctttccatttccatctgccatttcctctccttcctttctcaatcaatcatcttgaataagctgattatacataatgtctccatttcttcacttcactttccattttttacctatagtgagctggcttctatcactacctctgtattgaaactgctcttgccaggccaatagtgacctctttgttgttaaaaccaaaagaatcttcttttttaagatggagtctcgctctgttgcccaggctggagtgcagtggcgctatcatggctcactgcaaccttcgtctctcaggcccaagcgattctcccacctcagcctccagagcagctgggattacaggtgcacgacaccacacccggctaattttttgcatttttagtagagatggggtttcaccgtgctggccaggctgatctcaaacacctgacctcatgatccaccaacctcagcctcccagagaaacgtcttaccctcatctcacctgatccctagataataattagggttgtttgccatacccttattttgaagcatacttccatttacttacaaaatgacaaactcttctagtttcctttaacttttgcaggctcttatcttgcccattcattaaaagttggttgaccttagtgttccagcctagactgtctgctttttacactctgcattctctccaagggttaattaagcacctcggtggcatcctcagccttctctatgggatgagtcctattatcacctgcatcacagatgtgtctcctgaccatcagtctatattaccagccatctgtggggcatctgctcataactgagtcacatgcttcaccctcaacgtgtccaaaccaaagccagaatctttcccgctccaactgaccatgctccctacatatggttacattgtctactggttgcccaaaccagaaacctgagaggaatctttgactcttttttattccctataaccaatcagtcttcaagtcctataattctgtctcctgagtcttgctcaaatccatctttctccaaacccatcatatcctcactaactggatttcactctttcaggcttatgattttttagttcgttcttcacaatggaacaaacatgatcttttctttcaatggctcttcattacacttgagataaagactaactcctgaacttggctgataaggccatacatgatttggttaattcttactttctgcgtctctcactatacttgttagccatcctgaattcaactaagtgttcctacctcttagatttcatgcatattatttctttcctctctctatctcattttcttggacttatccttagggcccaactcaagacacttctacttaaagcttttcttatgacccaagtgtgatagtgttctacctacatgaccctgtagcactctgtactcatttctttttgaacatttatctcactctagtggaggaggtagacaaataaacagtacgtgggttcttggggaaaagggagtttaagaaggatttttgctgcctaagcaattggcatagtgcccttacacactctaagatgcttattaaacatctgttgaataaataaattcactaacaaagaactcaaactattagagttgatgttttcttctttctacttagctattaacaggtgtaagaaaaggaacattttcttgctcatgtatgcctgtaacctacaatgagtacttaaaggatgtctagtatttctcttattccgcttagtacaacctcctgtgaggttgggattagcctcattcccttgctcaggtgaaaagttatttgctcaaatgggaatcagaagccctgggttagtgttctcacccaaggtccagggccctttgcatcttgattttgcatcaaaagaataaaagcatcaatctgcttttattgttttttaaaaattcattttaaaatattctttcattcatttttgagacagagtcttgctctatggcccaggctggagtgcaatggcacaatcttgactcactgcagcctctgcctaccgggctcaaacgattctcctatctcagcctcccgagtagctgggattacaggcgtgcaccaccacgcctggctaatttttgtatttttagtagagactgggtttagtagagaccagggtggtcttgcactcctgacctcaagtaatccacccacctcagcctcccaaagtgctgggattgcaggcgtgagccactgcatccggccagtctgcttttattctatacaactctgtcttccatccattcctgtcttaatggctatttcattggccagagttctttttcaaattcaaggagatttgatggcatggaagagatgtggtggtaaaaagaaaaaatgtggggaaaacttactcagaaatcctattccaaaaacttggctgcttcagtggctgcttctggagagcaaggatttggtgtcaagggttgaagaagcagtcgtttgtaaacttatgtcaaccacttgagtggaaatggatgtgttaaactggaaaagtcattaaccctttagcataatattttgtgcttttgttcataacatggtgtgtgagtggagttatccccaaaaacggtaggacccagcacataatgagtgtcaaccataggctaggaactgaatttgtcttccccaaattctacaaaatattaatagttattttggctacatgagaaaaattatggttgagaaagtgtcttagtccattcagactgctataacaaaatactatagaccaggtaggtggcgtataaacagcaaaaatttatttcttacagttctgtggaggcttgaaagtccaagatcaaggcactgggagattctgtgtctggtgagggcctgcttcctcatagacagctatcttttcactctgcctcacatggtagaagggccaaggagtctctattgggcctcttttctgaggtcactgatcccattcatgaaggctccacccttgtgacctaatcacctcccaatggtcccatctccaaataccatcaccttggagatgattaggtttcgtcatatgaattttggggggatgcaaacgttcagatcacagcagtaagtcatccagatcacacagttagtaggtggctgagctagattcaaaatcagggctgtgtggttccagggtgcttctcaacatgtggcagatggtggattctggaatggtaccgcctgtgttcacatttgctgtatgactttactaggatgtcagactttgggaagccactaatctctccaggccttagttctgtcatctagtaaatacgaataatattacctcttcagagttacagtgagggttaataaggtagtatctataaagtatattctttgttttcttttctttctttctttttttttttttgaggcagagtcttgctcttgcccagactggagtgtagtggcaccatctcggctcactgcaacctctgcctccccagttcaagtgattctcccatcccagcctcctgagtatctgggattataggtgcacaccaccatgcccggctaattttgtatttttagtactgtattgttaaccaggctggtctcaaatgcctgacctcaggtgatccgcccacctcagcctcccaaagtgctgcgattacaggcatgagccgccatgcccagcctataaactatattcttatacatagtaagtgtgatataaatttaactgtcatcatcattatcactaccaccaccaccattacctttggtgtctttctttgccaataatgcaaattattctgggttatgagatcaatgggtactcagagtattgctctgaaagacctcagcattctttggaattttgcaattggtcaaaggtattgtatatgtaaactaaaaagtatctgagtcaggtctcaatcaatttagaagtttatttttccaaggttaaagacatgcccagaagaaaaaaacatggaatcacagaaacagtctgtagcctgtacttttctccaaagatgattttgagggcttccatatttaaaggggaaatgcagactggagggaaaagagggagagtctggtcactttactgaatccacatgttgccagggaaaagaagctggtagggcaatagacaattatgtatttatcttgtgctcagtaaatcagcactttacataagataaggtgaatatagagtagctacctgtggagatatttaactattagctatctgcttaggaacagaaggagaggcagtttcttgcatgattcaactttcagcttttttttttttccccatttgacatagtaaattgggggctggagattttactttcctttcacagatatatgactcaggatacattccaggagggattgaaagtatagtggagtagctccaaagtagaccacaactgtataacggacaaataggtcagctagttagttgggagcgttgccataggaattgttgtgctattaaatagggttaatgttttcagggggagatagtagcttaactagccatatttggatgatctacctagaagttgccacaaatatatttgaattgacttgatacaatttataataatattaaaattatacatcatagaataaataatttttttgagttcttattaaatgtccggaagcatgtaagcactttgttatcttatttaatcttcacaacaaccttatgtattggagatttttattattttcattttataaacgaggcaactaaggctctcaaatgtcaagtatgatcagggttgtcaaacagccaagggacaaattggcatttgaatccaaatcaggctgcctctaaagttcgtgctttttcttaactactatcatgtattccttcctaaacccacgtactggggcttcttagcaattattccaagtgcccgattttgtggatgacctcaagacgcagtcttcactcagatgtagacccgatcacactgaggcagattctccaaagcagaagaggcgcaagagcattctcagatggagagatgcccctgagagttaaactccagctctgatcatatttttttccacattttcttcttagttgaaattagaaagaccaccagcttataccttgcaaacaactggccttgcaaaggagccaggcccgacttttcctagtgcagcttccttattattctctaataagaaatagatttgataatagcaactagaattcatttagagtctttgttccaagaacaaattaaagtttccgctttgcctggaactcatattatttgaattgaaagctaaaatgtcctggactaagactgtctcagcagcatctttatgtaaactccttcattttaatttttttaacttttttttgtggttttccagcatccttccttttaagactttgaatatctagtaaacatggccaaaagtattcttcacactgatttggcttgaacttatggatgagaggagaaaacttactcttaagaatttaattagctttcctggcactgaatttctaagagagttatcaaccattcttttttcaagtcaaaacttgcaactcaagacggggagaaggattttcttaacatttcctgattccagaaacattctggaagatttatttttttaggttaatagagcaagataaagtattttgtttttttcaggacaagtagtcataacacatattggtcaatgagaaaattatggctggatttcttatctaacagctgcgtctgtgtgtgagggaagcaggtgcagggagaaaggaagggttagttcctattcttacaaaaagaatgacttttctactatgagaaagttcacagatggtaagtttttcagtaaaacaaataagtaagataagcagagatagtgtagagtcttcaaaaacacaacagtttaaatcaggaggggttgctgtactcagctaggtgtgtctggagcctgtgtactagttctgatttggacacattatttttctttaatcttttctttcctcctcctccttttcctttgctactggttattggtgtttaccatttgccagacattttactaagcactttacatacgttatctcactgaattttcacacggcctatgagagaagtataagcatcacctccaactgacaaacaaggaagtcaaggctcatgaaagttaagtaacttgccccaaatcaggcagagggaaaaggtagagccagtactcaaccctatgtctctctgactccagaccttgacctctcaactaccacataatactgcttcctcactgaaccttttctgttctttgtccccagggacaggatgagaacttcagtcaatgttgtgggtgactcttttggggctgggatagtctatcacctctccaagtctgagctggataccattgactcccagcatcgagtgcatgaagatattgaaatgaccaagactcaatccatttatgatgacatgaagaaccacagggaaagcaactctaatcaatgtgtctatgctgcacacaactctgtcatagtagatgaatgcaaggtacatttcccattcatggatatcgagacttgtatatagtagtgcatgcttgatttctttaaaaaaaaaaaaaccgtaaagccctgcatgtattattgtcacatttattttcctaaagaatcatgtaacccaagcttctgtgagtcccagatcatctaattctgtgtctaacatggcaggaaatcaacaagtctgatggagaaagagtcaatcagttgcttatttcgtccatgtgatgtgaaacaaccattcgggttcccctatctaccccatttaactaatttgaccagttgtcttgaatatttcgcccaagaatttgtggttactaggccgaggcgggcagatcacgaggtcaggagatcaagaccatcctggctaacaaggtgaaaccctgtctctactaaaaatacaaaaaattagccaggtgtggtggcgggcgccctcctgctagtcaggaggctgaggtgggagaatggcgtgaacccgggaggcagagcttgcattgagccgagattgcgccaccgcactccagcctgggcgacagaacaagactccatctcaaaaaaaaaaaaaaaaaagaatttgtggctactgactttcaaatattttattcctcaaattaaacatcaagagaaatccccagcatcatctgatgtacctagcacaagtagtcctccttgctatatatcatatattggtcaaaaatgtgccaacttaactttacacaactatctttttcttatttgtgtgggaaaggtgaattttgacctgagagtaccttgctccaaaagtgggtaaacaatttcaagtaaagaacagctatccttcaggacaattatccagaaatgtctttttaaaaacactacatctcagacaatgcctggctgtgccatctttctgcagcatggatgttctgggctctcctccaagctgttgggtgctaattcttcaagcttgatgggctctgtctagccttcattgtaactaatttgacattgtcaaagtcagagtgtcatgaccagagtaaagcaaacttggagaaaccctggcaggtgagcagaatcaactctgggggttggtttctaaaatgattccacacagcagctgaggacaagctgaacccagccagagatctctggtagctttttgacttctgttgacaaggtcacatttaatcactaatttcttcctatattacttctgggtcattacaaatacatactgtggctcttgctgggcaactaagggtgtcatagaaacaattctctttactggattgtaacataggtccagaattctagtggactagcacaggctttttcttgtcctctctttgtaagatacatacatgggtgaacaaggactctgaaacaaattagggagggaaaccacccatcaagaggcaattgcacaagtttattaattgactcagtgaaaatgattcaaattattagaaattcagatgtacctagaggacatgatgcattctcatggaaagctggtgtttcccacatctgagtgaatgtgctggattattccccatcaaaatgttagtttgaatcaacaagggtcaataatcttgtgaatggctttatgttctagtatatttaagtacttattgtgtgccttgtaagattcagttgagtgcgcctgtctcattcctgtgagatcctatattttgattattcatccagtatttattgaatgcctattatctataaagccataaattaggcactggaggacagcaaaaagaatgtataatgttgtaatgatgataagacttgaactcaaattattgccatatgaggaaaaattatgtaaaacaaaaaaatcacaattttttaaacatttcataattatatttgagaagaatcctagtggttaactgcgtatggcccttttggaatttctcaagaggcctcttaatattttgtaggacactttttgaaaaagaaggtgtgggcgtggagatgtctttagatttcagacttcctggatttgtttttgaaggacatcaagcacctgaggataaatttgcttctttttcttttttttaagacggagtttcactcttgttgcccaggctggagtgcaatggcgtgctctcggctcaccacaacctccgcctcccaggttcaagcaattctcctgcctcagcctctcgagtagctgggattacagtcatgtgccaccatgcccagctaatttttttgtatttttagtagagatggggtttctccatgttggtcaggcttgtcagtaactccttacctcaggtgatccacctgcctcggcctcccaaggtgctgggattacaggcgtgagccactgcacctggccaatttgcttcgttttttaaagcaaactatttcaagccctataaggaaatgtgaattatccatattagtagaaagtaagctcattaggagtaaggctttgtccccagttatactactgtgacccagccctaaaatagtgtctggcatgttgtaggggactcaataaatatttgttgaatggatccttttagcatctttagtccttgctgtgttttaggtaacctttttgctggacagttccatagagatagtggctcagtctctatgtaaatggttagccagccaaccacctgcaaactcattggttaattagcctttaggtgaccagtggtcaagctgagcaggtcttgaagatgatgaaaatagctctattggtttatcaactatttcagttgtttacatttttaatgaaattgttgggttcagcttagtgaaggctatttgatcctcagcctttgctaggtaaagcaagttgattcttctcactctaaatcagttaactgtgttgatgctggtgtgggaaggaggcagccagagccatggagataaatttacaccctttctgaggatatctgggtcacatttacttattcctttgaacttccttatggttaattctgtctcactatttcccactttttaaaaactgagatgggagatgtcagcgcttgctgccaatgccatcctctttttcttttgtattacccaagtggttggagcagagagaagtgggacaggttggggaatggagtcctggctttctttagcccagccaagaaaggaaacgccaaaaaaatctgctgtcccagattcttttgaaacataggccccagtatttacaaacaaaaaaacaaaacaaaaacacttccccccaagtgctgtctggtctttcaaaggcaccacactgtgattgataattttgtaccactattgatgcggttcatcgctgagagccaaataggcacattcaaggttatagtgaacagacaactttctctgggcagacagtctgtccctggcaatctttcttgacagttcactgaaagggaaacaaatttgctgcagctctggtcaaaactttaaccatttcaagcattgttatgtcttgttggtctgtgtattcaaactcttgcctggtaatagtagtttgaagttacacaatagttttcaagtttaatcagaataactgcatgtggagcagtcattgctaattgcatggtctgtttttctgaaaaaaattggggggctaatggggattggataaatggtttttattttcctttgcttgattcgttgaagggcacttggttttctgttcctagcatgttgtatgtggtcatgatgcatgcatttcacttccacttgggtaagaagaaagtcagatttctttcaaacattactgcgtttgtcacgtctccatattctaatgctttcataaatccagtctctccattatgtggaatatcagtcgtgggtttaagtttgcacatgacgttgaggacagacagacagaaggtaagctaggaaaactacttagaagtggaggggaaaacctcctattctgcaaaaaggttcagttcactttgagccagggaagcataatatagatggtctggtaattttatctgattattaaatgtctgcattgaagtaatttagataaacattgtcaccaatctcagacttttaattctccctacttttctttttaatctttaaagctgggatagcttatttggcacagctgaaatgtcatgatttctgatttaaaaattagacacgtatgccatctacctggtgtcattgcaactgaacctttcacatgcatgagtagaactagatacctagttctggatttcttcctctgtggttgtatggagtagcacatgggcactgtattttaaggactgtgttattgtgtgatggatctctgggtagttagacaccccacaacactaaaaacatagtagaagttattccccaaattacaaagcagctttaataccttgatactcccaaggcaaatatggatttttaaaattctcagatcactgttgaaacccaagacaggttcaaattcaatttggaaagaactccatttaaaactaatatttcagtcatgtagtataatcttggatttggtgcttctccacataacccacagggcttttttctggttcgtggtctgtaagctggatgttgatgataattattttcaggtaactctggcagccaatggaaagtcagccgactgcagtgttgaggaagaaccttggaaacgtgagaaataaggatatgagtctcagcaaattcttgaataaactccccagcgtatcctatggtaactgatgatataaacaagctttctttaaaaaggaaaaaaatgcgtatatttctatgtttacttaatctgttagccgaggcttagaggagctcttgtgagtcagtgatgacaggcacggtgctgtgtctttgccaaataatgctttataaccgtctaattttctcacttgtattattatttgaatggatgctgctggaggaatcagttggaattgaagacacgttcttgccagcttcccttttctcccaagatgcagaaatgtggatgctcttttcccaggggacatgagtaaagcagtgtggtacactccagggacttgggaaaatgagcaaacacacagcgtgttattccttaaagtgttctccatgtctcgccttgttatgcacaagagattctattaaaagcctctagaagtaactccccttaaaatgtctagtaaagcttgcacatggattgattaaaagcaaatacctgtcttagggaattctgacaatttatcttccatatgctctttaagtaaaatgtttcaaagacagttttaaagggagccatgctcttaaaggcagttgattaaagaacctgttacatctctgccttaccctgtgtaatctgtgagaacaatggttgaaatttcaaagtatgtttcattattctttctaaatttgataattgattaggaagtattttatatataaccactgtagatattgacaaaagtaagagagcacagtcaacataaagtttaaccagagttaaatattcaaatttatttatgttcggtttgccttcacctggtgtagtaaaatcaaatgagattatttggtatgtgttttgctttgtttaacccaaaagattattttttggttcctaaagaaaaagatatttttaatctgtcaattatttcagtcatcatctcatcgtcctagaaagcctggtcattttactgtcctcacacatggaagacacttgtgttggctgtgcctcttttaatgtcatctcttgatgaaacaaaaatactggtatttatccaatatgttgaaagcgttttgttatcttctatcaaagcacataaaaccagttataggacacagttggaagcagagccagtcttcctcctcagtcttctcagtagaaaggaacagaaaacaaacatctgtgcaaaaccctataaaagtgatattcctatggcagagtccaggcagccttgaacaatgacatggcaacaaaggatggctctgtacaacttcacagatggaatcttgtttaaggctgtgaagttttaaggaataaataatataattggtgtagcacagtgccttgcatgcagtaggcagccaacaaatccttaatgattggtaatgcaagctaaaatttttaatgtctctactatccttttttattgaataacgcacagtattttcctaaggttgctgggtttgggagtaagcttgggacttgaatcattgagaaataaagcacatttgactctaagaagtatgtagaaccttgtttataggtgagaataggctgtattacatgaaaccagcggagggatgctgagacagtcatggtttatagaatccaaattctctgagatgagggtgcttatggacctcaaatagcctttcttatctgctccttgtgacttctctcttttaaatcagatacctttgaaacatacaagagacatgagattccagttgtttttgtctcctaaaccctagtgatttttggataaggatcactactgaacagtattaggcaacttttcatttttgcttttcaaatgacattggtctttatttccagtagatgggcagtaaacagggtcagggtggtcaagggatatgattaagtgtagtagtagaaaatgcattctttttttttttttttttttagacagagtcttgctctgttgctcaggctggagtacagtggcacgatctcagctcactgcactgcaatgtccacctctctagttcaagcgattctcctgtctcagcctcccgagtagctgggactacaggcacatgccaccatgcctggctaattttttgtatttttagtacagatgggtttcattatgttagccaggatggtctcgatctcctgacctcatgatccacccgccatggcctcccaaagtgctgggattacaggcgtgagccaccgtgcccggccagaaaatacattctttacagcaaatgttataggttaaggagacagttcctgggtttagctgtgaaactgtttaggattttctttaagtggtgttcccaagagcttttttctggtaagttggaggctataggcaaagcgtctaggagcttgttgttttttgctatggaaggccagctttgggatctatatacatgggcatgtttctcaatggagtggtcacaggattctcttctcagaactctgcctgaaacctttccggtgtgttttgtcttcaactttttcctagctatcctattagcctgtaaatatgtcagcagacaatgtgtttggaagaaacaaggtgtacaacttcacaaagcaagttttttctggtctgagacttactgtgtgcaggaagtctcgtgagaatatacttagaaaatcacacttatctggaaattcaataagtcatattaaaaatatacaatttcttgaactcaggactagcctgaaaatccaaaatgcatgtagagttgacatgttgacatatgtctatgtcctctgtttttatgtaagcctcatttatttctcccttgccatgcccatttgggattttctttgcccagcatatgtgccataaacagaacaaatggatccagggtatacctctaataacctttatctaaatagaatacatttaacctgtcaattatatgtatagatttatcctaattggttcaacatatatatgaatgcttgtaatagtctgttactatttgataatgcataaatgttatatttatatacagttacagcaggccagaaacatacatacactgcatcctgtaaggtctgtaaatcagggcttcggcaatgccattttgctatagactcattcatgttttttaggaatcagaatcatttcaggagaaaaccaactaagtagactttaattcttctctttctcattcttgccctttgagaaacccaagtggaatcatcacttaattacttactcaaattcaatgaatcaaatccaatccaatcagtgagaagaatagcttatctttcaaggtaatactttaccttagatctttgagggcatgcttcccatacaaagagcatcagaaaatcagggcaatcatctagatctcacagatcttcaacataggactctaggttatgagagctgaaccacatagctatcagtttcagtttttacttcctattgagtgtgtagaaacacagcctatggttttgctgtctgcagaagttaccataccctgtaaaagacaaatatttctttctcctctcgaaccactagtcagcctggatattcatgaaagctgaaagaaggggtgccaaaatgcctagctcctggatttagactcatggaatatgagaaaggcttagggaaaattcaagtcatggggagattcctgctaggtgatgccaggaatctcaatgacctgttgattagagggtctctggtcatttccacttgtgtgtggagaaatacatcatttgcatatgtatctagtcaagaagcccttttggagcaaagtggttgggaaactcatttactgggtccaccaaaggaaacccaattctgccatgtttttgcaaatactacacgtccctttgctctcaatagcaaaagtgatgttatagttttttttacttttgtcagaatcaaggcttcggccacctgtgcaatattttcccatggaatgcagcagtaaatccaagtaggtatatccgtgctcagagagaattctccatagttctgactcctgaaaaacaagtctcattagctctcatctagtttgatgactaaaagtgcacagcagttataccccagtggaagtgatttttctcacctagctgctctctaactcttacggctatctagttgtctgagctgctggtttgttttacttattctccaactgaactcattccaaaccaagaaaaaggaccaaatgaaattttcagttattatcatacttgctccttgaataagaatgctagagtctggaggcagaagaagactaagttaaaaaaaaaacagcctgaaggaattctggagtgagttttgtaagtctaattgtcaaagaagataaatggtctcagtatctgtagtaatttctggttaagcctagagggatcactgagtgccaatccaagcaggtggcactagaggcagattgttctcctagcatagagtgagtttccagctgctcatgacacattttcttatgattttccctaaaagaaaaccaaattttctactccacctcttcctttcctatcattccacttattgttgctgctttgctaacagccagcttagtaagccatcacacaagttagtgtgaggcttggttttaaaatagataacagagaatcttgattaaatagtatccaactttgtagcataacacagctaattcaggcaatgacatagagatgataagaaacaacatggtttggtagagggaacatttgatttagactctgcccatttttagctgtatgacttacataagtcattttgtgtccaagcctcattttctcccatatgaaaagtgaaggggttggattaaatgactaaaatccccttccagccctatgagcccaatgtattatgatctctgctttgtttccttcttaagaggcttcctactataaaatgtgacctatttacattttaagttgaagtagcccacaataatgaataatcaatttagatttttctcatctcctttgggagaaattaaattcaagcctctattcatttgatgttttacaacaagcttcaaagttggccatgttcattcacagtttgatattttgagacaccaataaaagttttttaataaaagttcccttgacttaaactcaccttcctaatagaagtagtgatttggctcacggaaaaatgtttccagagtcaacatgagaggactggatgaacctacagcctcactcaagctgttgcatcattgctgctgtagcaacagagccctctctgaatacccaaaacacacaattttctccaacaattctaattgcccacccagtatgggaatttgagagcctttggtgaataaccttgatcactcttttgaaatttggtacaacacttgcacaatcacggcaactgtttgtaaatatcttttcttctccgccagtatgtagacatgcacacccattcacaagtaagcccgcaaattcattttcacattttcctcttggtttgtttttatcatgggtatcacattgcaggaagagatgctctaacttacaagaatggaattttctgactatcattgccctcttcaaggcctgattagtttgtagggtggatgggatacaatgcatggtctacaaggtccatgtcaccagccatgatctttaaacaacctcttgcactttctggcactgctgcaatggcccatggtggacacctctgctgtttgtccaaacttctgctaaatagagtagtgttggtatttgttgtgttgtgaactcctttgttgtcagagaagacttcagctcttcaggtttgcaagggcaagatgtaaagctaggactgaaaggattgggttttgtttttcggccggcttttttccattagtgcaaaaaacctgatgcaagggcagcaagataaacacaatttcttcattgacccagataagaacctgtagaaaagtgagagatgcccctaagttcctatttcatttatcctaaataatatcctgaataactactgatcagtttttttctatgtccagccttgcttcactttccaacctccaggccaaatattcattttgatattttacaaaatccttctggtttttacacagggcccttttgtgctgagaataaaaccagctattggaacagacctcactgctttgtagagtcagaagttgacctagagaatgggtagcaacaggtcctcagtttctctggagacacccccaatccttgggtgagtgttgaaacctgacaactgactgttagccttgtcatcatcctcactggagatggagatgttgcagtcggagcctcactccttctggggcactgtttcttctcatggcaaccattttgcctgcctggaaacagcctgttgcctttgctagggggcaaatacacacactagccaaggaagttggtccagcacatctctgaggtttctcccccatggacccatggagcgaattccctgagataaatgatcagaaagttggctgtctggtggtttaatactccataagagttacttcccttatagaaagtcatcctttggcatctagatttttctacaaatcaccttaactccctccctttctctttctcctggaaaacctcagcattgcatctccatgttgcacaacacagatcagattatctggtcactatagagatttgtatataaaaaaactacttttttgaggattttgtatattgtttttctatttgttttctacagcttgaggaaagagctggcaaactgtgaatctaacttgatcttgttgccagcagatatattttggcttcctggtaagagtctgtgttaccagggacaatatattgccctctgatcagtattgcaccctaaatccacaaattcctccagcccagtcttacatttttttaaacaaatcccctagcttgtttgctattatttataaagagcattagaaaatgtatttatagacctggatgttatatgtttaatattaatttagcctttaataatgttataggtttgtaactattcttcagaaattataaagaactcagtgtagactgaattaatctatttagtatctgtaattttgcagacatattttcttacagtattttctatgtaaccacacatgtagaattataactaattagagcacaagaagtttcttcagcaatttagagctaccaattgtttcttgactatatagtcacatttgacaaatttaagaacccagtctttagtgatgcaataaacaaaatgaaccattaagaacaaggaattgcttaaatcccttagctggtgaggatatacatctaaataattcatctttctaactcaaggaatggtgctgattttttaaatgtttgacaccaggccttgtttttccagctgagcattctcattttgcttttctctaagactatcaaagacaaggtattaatagtaggattattcctagatcagaatgtttcatacattcctaaaggtttatgtggaaattggcttaggaaaactttgagtagcagagactgaggatgagtgctagagatgaaatcaggacagatttgttgcagttaattcttgccaagcaaattagtggtaaatgtcacattgttatgtgaattgagcacatatttttaaagaaagtttacaaaaaatttttagaaccaactatgaggcaatactgtatcactgggggctgggagtgggggcttagaatcatactgaaattgtttaaaagcagcccaggtagtttctgtcctcaggtgaataacagactatataacttccccgaaaggtaaaacgatagccactgcagagacgaggtgtcttccttccaccaaatactttctgagatggtggtaggagtagtatttttaccgtggtttaaaaagtagtcagttacatagaaagtgtattggtatgtatttgaacctgctcttcattaaacaaacagattagatgtaccctcgactggcaataattgtatctattttcaagtacagctagctgtcaaagcatgaagctcttgtgtatacacactgacacttggttcacgcatgaagaacagtgcctatgcactttgtgtagctataatgtaggtatctaggtgtaatttcagtgaaatggtgtatagatgtattgtaatttaaatgtatatgttatttttggctattcatctaaatgcagtagacatgttgatcggtgttttgcaaacatttctttttccttcttagataactagtcgtgaatcatttctcctctttctcagtgtggcttgggaatatatatgagtgaagaatttatctgtgaatcctttgtactgatgattgtttgaaagtctgtgtgtgtccagcacctttgtaaatacacaattcagagcagggatgggctgggtgtgtgtcctggttcttagtgaaaggtcatctcatgtctgtttaatacatggtgaatgcaactgtggaacttttgattacctagacttaggtaggtttagaatgagaacatccatctacagtcctcctttgcttggtggattgggctcagaggaacaaaaagttagtctgactctgtgcatattagcatcatgtctttagagaaaggtcagcctctctggttgccaaatactcatcatgatgctcatgacttaaaggttctgaggagccttgtctcccttggatttttgagtcagggtacaggaaaaaacattgctgactaactaactgcaaatgcatctgcaggtgaaaccctacgaaagcacagttctggctataaacttcagagttctctgtaaaaaacttagagcactagaagcacaggaatagtgagtgtacagcttatgcggttgtagaggggcaactgatgaacacaggtcccacatatatgagggagtatgacgttctctacctaatatgttctgtgtgcatgttttgaatgattgaagatgggattaactaatgcaagtttacagttgcctcctaaaacacacattctgtataattatcgctaaatacaatgctgtgaggtctatagttcctgtaacccctttctcctccccaaggacagagaagaactagccatgtgctatagggaaccctgagtgccctactcttttcccaagaagggtaaagcctacaatatcatcagggggcatgaagcacattaatttgcagtggctgcttcatatgaggagatatggtggacaggctaatttttccttgaaaatgtggcttcttcaactcctttcaaatttaggatggaatacttcctgaaataaaactgggctttatgcaggattctctttgaaaattcttgtatgtccagaacaaaagataaaactaattgtattcctcacattcacaatccccattggtctgaagtcacgtagcacagagcatctatagcacatagtgtttaaagactaatgaatgcaaaaagataaaatcttcaactaatttttgaattgtttctcatatatgctactagaaaatgccttgttgatgaagcacattttgggtagttgaggtcttttgttttcgcctttagctttctaagctttcttacaatgtggactgattactgtaacatttcacgtgtaaaataactggatattctttatatactggaaataacctgtgaatccaatatttcactaagtgttttaacttttgtgtatatatctctcatcaataaatgtggatttcaatttattttggttgttgcctcttctttaattcccattttagactaattgttggttacatagtagtgttctttttgtagaaacatgaattgatggctacaatgttaaaatgagtattttctaggaagcctaaatatctattggaattacatcgtgcaatctaaagttagtaagttgaatgaaatggtatatagtcaatgaatcagctggtatggggtagccctcaaatctcagggccttaaaaccaaagtgtatttcttattcatgtgacatgtccattaccagttggctgggagactctgctctgtgctgtcctcactcaggatgtatgagggaggctccatctccatgcttttgcagctgccagtgcaggaagaggaacttggcaaatcttacatggactcttacagcttcccctgaatgtgtgtacctcacttctgctcatatttcaagggccaaatcaattcacatagctccatctaactatgaaaggaagtgcaacctcaccagattcacaggaagaaaactggaactagctggtgaatagctctaatgactatcaggccatggaaatcccttaaatcattcataaaggatagtatacaaacatatcatttctcgacaagttcaacatagcaagtttttcctccagtattggaaaaataatgactgtggaagtaaggggcaagccttaactggtgatgctgtagaaataaaatgcatgctcttcgacagtaggatcacacccagcatggtgagattctgatgcactgaaaggtatatgtccaggaacagagacccacagaaagagtggcagactcttgcgtcacactgtaggacacccactgttagatggcctggattagttgaattgttttctcttattctattttagggggaaatgaggcaaatatttgattttaagtaagtaaaatacatagatgtgatacaccacgatttttttcaccactgtcggtaatttattaaaatattgaaaatggacacttcatttgaaaagacatgttttgttcttcccttggagccaggtctacatcccatccacattcaaaatgttattaaaatcttaattacagaaaatatgctcattagtaaatctctgagctgccattttattttaagatagcagatagccacaaatcagagttaaggtaaacttcttaatgctttagtatgtatactcttaggtccaaatcagccactcctgccaaaggcaacacacccagagagagacttgactttgcttgctcagggaatgtgatttccctgctcttctggatcagaggtgtttaatccatcctttgtgagggcccactaagtgctgcttttaattaccactgcatgaaaaggaaaaataaaaaagaatttacaggggtaagtagggaaagagtaattgtggactgagagttttgacccaggaattctggtctccactcagtcactgaagggtcatacgaatgtggccaaatgtctatgcaatttggaagtcatcttggcatacataaaatgaggggtttcaagtagatcacttctacgcttttggactgtgaaatttgaattatcttacccaggtaagtcatcatgactacagatttacttttattttctaatcttactatcttaatataacatctcatacctacaaaagaatctctgtaacccatgtcttggtcttatgccacatgagatactagcccacaagcccactacccaatgcaagagctatagagcgtcgccaacagccttccttcacccggtgctcctcgcttgttctcgtgctcctcccttaccttgttctcatgctttactccccagaggaagctgctacttgcaattttgtgtctattgttcccctgttgatttttttttaaatagttctaccccccacaacatacgtgtacccaaaccagctttgcttatttttgagcttttttaaaaagagtgcatgtagtctttttgaactgttatttttctatttagcattgtgtttctcagtccatccatgttgtttcaagtaactgtggtttgttcattacacggttgtgtaataatatgatagcatgtgaaatatgtcatgctttgtttattcatttttttggacagtggacttgtgctcttttccaggtgtttttctatgtcgagcagggctgctatggacattgtcatctatgtctcctgtgtgtatgacccaggaggctttagtgcatgtggtcctaatttttaagaagtatgtgtatgtgactgaaaagttcctgttcaaatcttttacccatttgtccatagccccatcagtgagtccacttgttaaccatttggcacccctaataatccatgcactgctagtattccccaagtgattcacacactgctaataatcccctagtgatccatgcactgctagtaatcccctggtgatccatgcaccgctagtaatcccctggtgatccatgcactgctagtaatcccctggtgatccatgcaccactagtaatccccaggtgatccatgcactgctagtaatcctctagtgatccatgcactgctggacccctagtgatccatgcaccactagtaatccccaggtgatccatgcactgctagtaatcctctagtgatccatgcactgctggacccctagtgatccatgcaccactagtaatcccctagtgatccatgcactagtagtaattccctagtgatccatgcattgctagtaatctcctagtgatccatacatcgctggctgtgttatgggtccatcttgccaacatggatactgagacaagcaaaatgagaccatttttaggaagggagtgtaagatgaagggccgaggccttctttcctcaggctcaaatgatgaggcctttgagcacagatctaatgggagcaaaacagggcccacttcatctttgatctcttctttgaccgataatgtgtgaggcccagcaggctctacctgacatcagcgggctgtttgctttgatgtgaattgccaattaacagaggaagttacagaaagtcacaaaaaagtctttccacctaccacaagaactgccaggagccccttgagccacatccccaacgaagttctggctgtgagaaccctataggctgagtgctttatcaactacagaaatcaatgccttgcagttgaggaaggcttgcagtgtgagatcagtgtggcagcatggtgttttctggggagggcccccttctgggtttctccttatatcctcacatggcagaaagagggcaggggaactatctgaggtcatttttataagggctctcatcccattcgtgaggaatctatcctcatgatctaatcacttcccaaaggccccacctcttaatactatcaccttgagggtttggatttcaacttataaattttggggtaaaaacaaacattcagtccattgcagtgccctgccctgtgatggaggattgtagaaccacaaagggcaatacctgcaaagagcgtgaactgtgtggcctgccacctaaggcactggccctagtgtgggcacctccttccaggcacaatgtcataaacaggatgccagtgttctgtacgtcaaagaaccacaggtgacagcgggttcaggcacctccaggagagctttcatgagaagctttcctcacttgtcacctttcagcccagacaggaaggtgtgagtagagatgcccacacatctgacttgggttgagcaaggagagaagactgtggagtccctggcaacaacacaaatgtttttagctcaataattctttgtcctggtagtttttaaagttcaattaattcattcttccactgaggcagtgaaaggccatatttgattcccatattgtcctaagaaaaactgagccacagagtcaggctcaaattccagagtgtagactgggtccacacagcttgtccaaaaaaatataaaaagaataaagccatccaatgcaaatactgtttttactctcaaacgtttaaaagcagagacgttaaactctgaagaattccataaagcagataaataaaatattatttcatggttctccctttcctttttacaagctgaatgaatatgtaaaacctccacatctttttatgtctgttatttggggtaatcagattttagccttccaaatattgtctggaaaaatctagtggcttccagttaaggaaaaaaagacaaatttagaattgcagtcatctgttcctcactccttttgttgagtgacctgactcccctggaattctccaacagcttctgtcacttctcagatgttttccaggcctgaataacacactgctcacaaagggaggagccacagaatttcccaactgccttcctttgagtgaacagttccgttggaacaccatcttccttctccacctgatcccaaacttccctttcatcttggtgatgaggacagagatcattccagattgtaaagccagattgttagcccgtgcttttttgcagataaggaagaagataccctagtttaaatgaactagaggtaactcagttacaaaccaagcttaagtcctggctccatccctttcctagctatggatgattggattgttaacttagcctcaattgcttcatcagtagaatggggctaatcatgcctatgagatagagattttcatatgagaacattcataaagtagttagtccagtgcttggcacataatgagggctcagtcagtgatagttaccaccatcatcctcatcatcatcctcattatcactattttcatccttagcgttaccaatcaccacttctttgtgaccaagctggaagaagtcatgcctcctctctcccagtttggcctttaccccaaccatatcacatggacaccagcatgtaatccatagctcagctgccctcccccaaatctgagctttgttagtagaccatgagctttcctgacctagcctgggataaccccacctttagtctagaggagcttcatggtcattacgagtttgcattatctgatgttccaaatgtcttcagttacttgccaagtctctgaggcttagcagtgagagaaggcactgcatttcttcagggaaacgaagtgagtttcagcctggcccaagtgacctctcactgagatgggagcctgagctggcccttccaatgggaaacaggacatccagaaatgaagcaattcttttcctcactggaggagtccctcagggagtccccagctcacagccttggatgggctagttgagacaaatgtcatgagaaaggccatttctgtggaatgtacccacccagcatgactctccagaatgcccttagctgatcaattcccagcagctctccttcccatcatccctttattctttgccttgtgttctttcacaaatgttcttgctcttccaagagcagatctcaggaggaacttctgtgagcttttaggttgacggagcttccctgtggctatgctagaatcacctcaaaatggtgccctctatagttttcagcagctcagggcatcaccacaaccttaagagtctgctatttactattaatagtaaatcattaattaataataatattagtaataatacaattattaattgtcttaagtggggatcccagtgacaaaattcaaattcacaagattttcttgagggagtatttctcaggagggcctgtaagggcacgaggggagcaggacagggaagggaaagagctgagcaggaagatagtctcaggaaaagtctaactttgagttgtctccttgaggaaacgaggtttatctttgcgcactcatatcagtcagtcattggctatgggctacttacgggaaggaggcataacctccagggtgaggcagctcccatctgcagaaagccgtttgctggagccagctgcaagtttttagctgtcaacacagcagttaggctatgagtgcaccaatccaggaagggggtctgggcagagcaccaacagcatctcctaaatatcccattccccacatgcctgctatgtggcagactcttatgtaggttctttagtcttcaaaacaactctgtgaagtagttgctatcactctccccattttgaagataaggaaattgagattcagagaaggaaatatgcacacctaagaagaagctgacctgaaagtctttctagtttcaatgcttcctactatattccctctgttttctcaaataacccagagactatactgtcacattatctgtttcttatggtggttgaacctctgtgctgggggcaacttcccttgatatctaattttgaagtcctaattatgcttggggctttagggcattcaaagaagattgatcatgcttattatcccatagggtcctgcattatctacttgcctacctcctggaatcatgaaacccatgtacggtaaagaggagatctcaaaaaataactggagccgatagatgtacccatactggttggccccagtcagttagaacatattctcttccctaaagaatttgctaagtcaataggccaaggagtgtcatattgagactgagctttgatcaactaggagtgaggaagattcttagacactatctgggcagattaggaaagaatccagattgattataaatgattgcaaaggaagaaggaagggggagtgactaatatttgtcttatatctgccatccttgcaggtatcagtcaggatgggctgagttgtcctgcagtaacaaacaatatcaaaatctcaatggtctcaacaagataagtttattattgactttcatcacagtctcactgtaggtcaatagaaggtcctgctctctgtagttactcagggaccctagatgacaatcaactactgtttttaaacaggcttttgttgacgtgccaatggagaaaaagagctctaggaaagtccttacctgagcagttaaatgtcacctcagcttacaacccactagcctggtcaaatctagccacataatcccacccagcttcaagggataatgaaatgcaattccaccacattctcaaaatggggattgggaatgttggggggctggagagtagagagagagatccagaaacatttggtgaacagcacaaatatgataccacagtctacttctctggtcacctagtattcggtaactctgtttcccacacgcaaaattcttcaaagagaccacataaaggtttcatccagtcatgacatcaaggtcaaagtccaagaacttggcaagatgcatggaagttttcacacatggttcagatgtggcttccattgactcaaaaatttatgaacagaaaatacatgttttctgtagctccattccctccttttccctggcacacaaactccaatggtggaataggaacagttcagttaccataaatactcctgtctggaaaggtgacccctggaagacttacgagtcactgagccatagcatttcagaaatcctgatgggcagacattacagagcccttacactataataaggaattcttttgtttgtttgtttgtttgagaccaagtctcactgtcaaccaggctggagtgcaatctcggatcactacaacttccacctcctgggttcaagtgagtctcatgcctcagccttgagagtagttgagactacaggtgtgcaccaccacacccagctaattttttgtatttttagtagagacagggttttgtctgtctggtttgtctcaaattcctggcctcaagtgatcccttcacctgctttggcctcccaaagtgctgggattacaagagtgagccactgaacctagccaataaggaaaatgcttttattagattctggtctggccccctggggcagcttccccagtccatctccctgtcttcccccatggcccttaatattaccttctaggaagtccttctttttacattatactttgttgacgcatctaaagagaacactaggaaataatctcctcttcagcaacatcctctgctttatgctctcagaaagttaaggttcattttcggtcttgaacagttacagagttttctaattaaactccatagtttttttggcatcacaactcttaacatctctgctggcctttatctttttgactctaattagccatatatgccaaccaccataaccacagcccttttaaaaacatgttcctttttcttaattgtgggtaccttgagtcaatcaggcttaaggcagagaggcgcattcttagatttatttttcccttagccatttttttaaatgaaagaatatcctggatgccacattagttaatgcagaggctttaacaatggatgtaatgaccaagcacttgagttgattttgcctctgaggttgagttgggttttattgcataaagcatctctctcatttcatcttgtattgttgcgaattaagaagcaattgtctcttctagctccacaactgtttatatttcttaagttgctctttccttctggcaggtaatagagacatttttagatcacagttgtgccattagtcagggtctctgagtgactatgatgaaagaaattgtctgtggcctgtgaggagcatatagcaagaatgagcaataaacttttattattttaggccactgagagtttgcagttgtttgtactgcaaacaactgcctggtaacattaagcaaatctatctcttgctctggtatttcagcttagatgtgtcttctctggtgtaacctcagttgggaacaaaataaaacactccttatatgctagtaacaaattgtgcctatgaaaatgatgtttaactgtcctgaagagagaagactttgatcattaaagaagactttccaaacacaggatgaaggagatgacagaataggtaaagtcaatctctgaagatataatgttatgatagtttccctaagagtgaggctagagagtttcagaatgacaaaacattatttcttttttgcacctatttcaaattaaaagtgaggtttttaaatagctatgttattggaaattaaacaatggactggtagattagaaatgaccaaaaactaatgttacatgtttatttccacccccatgggatggatctccagttatcccctgaagagatgaatctctagctatcccctgaagagatggaaatctccattgtccagctgggttcttgcaatggggaaatgcctagtggaggatgctcttgttcaacagttattgaacatgtattaggtgccaggcattggtctatgtgtatttttatatatatttacataactttatatatatttctacaagtgaagaaactgaggtctaaatatatcaagtacaatgccctcaggcatgatgtccagtaagtaagcaaggatcagggcagaaaggctggcctgcctctatttttcttagatatgtagaggttaggaggcagattagttttgccaggatgcagccaccacagctgccattcagcagctatgccactcagcagctatgccactggaccacagccattgtgtcactacctctgtgaatctctcttcatctctcacttgtctgtgtgtgatttgctcaagattcaaagtcctggacaggagaatcctttgtgatcctcacccccgtctctgaccacttggtgcctccaaggcataagcatctccaagtttctgctggagcaactggctctctactcagaggctctcactctgctcacacttaggtgacatcttcctacacctgctagatcatgaattcctctgccatttactgttttccaaaatctcttgatatctttttctgctaaggtcccttcttccaatctctttgtgagtctacattattttgatgcatttgtgatcatttgagtaagtgttaggaaggagaatacataatgagtatattcaatctgttgactttaactggaattctgtgatggaatattcattctcaaatggaagcaacacttcacgctgcttcccagcaagcagctccaggtcaatgt

SEQ ID NO: 1208 - DNA, 1970 bp, Homo sapiens
cagccgctcgactccgctggacctgggacccccagacgtgggaggatgggggtgacctagtgtcttccagtagggcaatctctggacatctttatctccccagtacctctccagatcctgaagcctggggccagggaggagaggttagatgtcagcagtggaaggacagtgccaacaatatgcccaagcaggtggaagtgcgaatgcacgacagtcatcttggctcagaggaacccaagcaccggcacctgggcctgcgcctgtgtgacaagctggggaagaatctgctgctcaccctgacggtgtttggtgtcatcctgggagcagtgtgtggagggcttcttcgcttggcatctcccatccaccctgatgtggttatgttaatagccttcccaggggatatactcatgaggatgctaaaaatgctcattctccctctaatcatctccagcttaatcacagggttgtcaggcctggatgctaaggctagtggccgcttgggcacgagagccatggtgtattacatgtccacgaccatcattgctgcagtactgggggtcattctggtcttggctatccatccaggcaatcccaagctcaagaagcagctggggcctgggaagaagaatgatgaagtgtccagcctggatgccttcctggaccttattcgaaatctcttccctgaaaaccttgtccaagcctgctttcaacagattcaaacagtgacgaagaaagtcctggttgcaccaccgccggacgaggaggccaacgcaaccagcgctgttgtctctctgttgaacgagactgtgactgaggtgccggaggagactaagatggttatcaagaagggcctggagttcaaggatgggatgaacgtcttaggtctgatagggtttttcattgcttttggcatcgctatggggaagatgggagatcaggccaagctgatggtggatttcttcaacattttgaatgagattgtaatgaagttagtgatcatgatcatgtggtactctcccctgggtatcgcctgcctgatctgtggaaagatcattgcaatcaaggacttagaagtggttgctaggcaactggggatgtacatggtaacagtgatcataggcctcatcatccacgggggcatctttctccccttgatttactttgtagtgaccaggaaaaaccccttctccttttttgctggcattttccaagcttggatcactgccctgggcaccgcttccagtgctggaactttgcctgtcacctttcgttgcctggaagaaaatctggggattgataagcgtgtgactagattcgtccttcctgttggagcaaccattaacatggatggtacagccctttatgaagcggtagccgccatctttatagcccaaatgaatggtgttgtcctggatggaggacagattgtgactgtaagcctcacagccaccctggcaagcgtcggcgcggccagtatccccagtgccgggctggtcaccatgctcctcattctgacagccgtgggcctgccaacagaggacatcagcctgctggtggctgtggactggctgctggacaggatgagaacttcagtcaatgttgtgggtgactcttttggggctgggatagtctatcacctctccaagtctgagctggataccattgactcccagcatcgagtgcatgaagatattgaaatgaccaagactcaatccatttatgatgacatgaagaaccacagggaaagcaactctaatcaatgtgtctatgctgcacacaactctgtcatagtagatgaatgcaaggtaactctggcagccaatggaaagtcagccgactgcagtgttgaggaagaaccttggaaacgtgagaaataaggatatgagtctcagcaaattcttgaataaactccccagcgtatcctatggtaactgatgatataaacaagctttctttaaaaaggaaaaaaa

SEQ ID NO: 1209 - protein, 565 aa, Homo sapiens
MPKQVEVRMHDSHLGSEEPKHRHLGLRLCDKLGKNLLLTLTVFGVILGAVCGGLLRLASPIHPDVVMLIAFPGDILMRMLKMLILPLIISSLITGLSGLDAKASGRLGTRAMVYYMSTTIIAAVLGVILVLAIHPGNPKLKKQLGPGKKNDEVSSLDAFLDLIRNLFPENLVQACFQQIQTVTKKVLVAPPPDEEANATSAVVSLLNETVTEVPEETKMVIKKGLEFKDGMNVLGLIGFFIAFGIAMGKMGDQAKLMVDFFNILNEIVMKLVIMIMWYSPLGIACLICGKIIAIKDLEVVARQLGMYMVTVIIGLIIHGGIFLPLIYFVVTRKNPFSFFAGIFQAWITALGTASSAGTLPVTFRCLEENLGIDKRVTRFVLPVGATINMDGTALYEAVAAIFIAQMNGVVLDGGQIVTVSLTATLASVGAASIPSAGLVTMLLILTAVGLPTEDISLLVAVDWLLDRMRTSVNVVGDSFGAGIVYHLSKSELDTIDSQHRVHEDIEMTKTQSIYDDMKNHRESNSNQCVYAAHNSVIVDECKVTLAANGKSADCSVEEEPWKREK

SEQ ID NO: 1210 - DNA, 40049 bp, Mus musculus
  misc_feature (1)...(40049): n = A,T,C or G
tgacatttagggaaggagtatgtgggcagaccactccaaatatgaagatatttgtgtctcatttagttgatcaccaatacttgcatcagccaaggattttaatagccaaatatataggttgactggtgagtgctaattcatttcctattccttcctcattattggctcatggggcacatgaccatacttgccatggtggcacagatgggaggtgcacatgggttcaacagcatggacttcttttcaccaagactgacctggtgcagttgctgctcggtgttaaatctggcaactatagagactatctctgtgttcctggtatcatgccattctgtagcatgatgagccagaagctaggtgataggtggattgcatcagttcacttctatagtaaagaatggtgaccaatcccttccggtccactccaacaatggggtgccttgtcctctgagtctccggacacccgcaaggacccacacaggatcccccatggcatcctaagacctctggtgagtggaacacaacttcagccaggaggcaggttcaaacaccagatatctgggcaccttccctgcaagaggagagcttgcttgcagagagtactctgatcactgaaactaaggagagacctagtctcccaggtctgctgctagaggctaacttaatcacccgaggaacaagctctaaccagagaaaactataacaactagcttcagagattaccagatagcgaaaggcaaaggtaagaatcctactaacagaaatcaagaccactcaccatcatcagaacacagcactcccaccccacctagtcctgggcaccccaacacacccaaaaagctagacccggatttaaaagcatatctcatgatgatggtagaggacatcaagtaggactttaataactcacttaaagaaatacaggagaacactgctaaacaggtaaaagaccttaaagaggaaccacaaaaattccttaaagaattgcaggaaaacacgaccaaacaggtgatggaattgaataaaaccatccaagacataaaaaggtaagtagacacaatagagaaaacccaaagtgaggcaaagctggagatagaaaccctaggaaagaaatctggaaccatagatgtgagaaaccctaggaaagaaatctggaaccatagatgggaacatcagcaacagaatacaagagatggaagagagaatctcaggtgcaaaagattccatagagaacatcggcacaacaatcaaaaaaaatacaaaacacaaaaagatcctaactcaaaacatccaggaaatccaggacacaatgagaagaccaaatctatggatactaggagttgatgagaatgaagattttcaacttaaagggccagcaaataacttcaacaaaattatagaagaaaacttcccaaacctaaagaatgacatgcccatgaacatacaagaagcttacagaactctaaatagactggaccaaaaaagaaattcctccggacacataataatcagaacaacaaatgcactaaataaagagagaatattaaaagcattaagggagaaaactcaagtaacatataaagtcaggcctattagaattacaccagacttttcactagagactatgaaagtcagaagagcctgggcagatgttatacagacactaagagaacacaaatgccagcccaggctactatacccggccaaactctcaattaccatagatggagaaaccaaagtattccacgacaaaaccaaatttacacattacctttccacgaatccagcccttcaaaggataataacagaaaaaaaccaatacaaggacggaaatcacgccttagaaaaagcaagaaagtaatccctcaacaaaccaaaaagaagacagccacaaaaacagaatgccaactctaaaaacaaaaatgataggaagcaacaattacttttccttaatatctcttaatatcaatggactcaattccccagtaaaaagacatagactaacagactggctacacacacaggacccaacattctgctgcttacaggaaacccatctcagggaaaaagacagacactacttcaaagtgaaagtctggaaaacaattttccaaggaaatggtctgaagaaacaagctggagtagccattctaatatctaataaaatcgacttccaacccaaagttatcaaaaaagacaaggagggacacttcatactcatcaaaggtaaaatcctccaagaggaactctcaattctgaatatctatgctccaaatgcaagggcagccacattcattaaagacactttagtaaagctcaaagcacatattgcacctcacacaataatagtgggagacttcaacacaccactttcatcaatggacagatcgtggaaacagaaactaaacagggacacagtgaaactaacagaagttatgaaacaaatggacttaacagatatctacagaacattttatcctaaaacaacaggatatacattcttctcagcacctcacggggccttctccaaaattgaccatataattggtcacaaaacaggcctcaacagatacaaaaatattgagattgtcccatgcatcctatcagaccactatggactaaggctgatcttcaataataacataaataatggaaagccaacattcatgtggaaactgaacaacactcttctcaatgttctcttctcaactgaacaacacttcttctcttcttccgtggtcaacgaaggaataaagaaagaaatcaaagactttttagagtttaatgaaaatgaagccacaacatacccaaacctatgggacactatgagagcatttctaagagggaaactcatagctctgagtgcctccaaaaagaaactagagagagcacacactagcagcttgacaacacatctaaaagcactagaaaaaaaggaagaaaattcacccaataagagtagacggcagaaaataatcaaactcaggggtgaaatcaaccaagtggaaacaagaagaactattcaaagaattaaccaaacgaggagttggttctttgagaaaatcaacaagatagataaacccttagctagactcactagaggccacaaggacagcatcctaattagcaaaatcagaaatgaaaagggagacataacaacagatcctgaagaaatccaaaacaccatcagatccttctacaaaaggctatactcaacaaaactggaaaacctggacgaaatggacaaatttctagacagatgccaggtaccaaagttaaatcaggatcaagtaaatgatataaatagtcacatatcctctaatgaaatagaagcagtcattaatagtctcccagccaaaaaagcccaggaccagattggtttagtgcagagttctaccagaccttcaaagaagatctaattccagttctgcacaaactattccaaaaatagaagtggaaggtactctacccaactcattctacgaagccacaattactctgatacctaaaccacagaaagatccaacaaagatagagaacttcagaccaatttcccttatgaatatcgatgcaaaaatacttaataaaattctcgctaaccgaatccatgaacacatgaaagcaatcatccatcctgatcaagtaggttttgttccagggatgcagggatggtttaatatatggaaatccatcaatgtaatccattatataaacaactcaaagacaaaaaccacatgatcatctcgttagatgcagaaaaagcatttgacaagatccaacacccattcatgataaaagtcttggaaagatcaggaattcaaggcccatacctaaacatgataaaagcaatctacagcaaaccaatagccaacatcaaagtaaatggagagaggctggaagcaatcccactaaaatcagggactagacaaggctgcccactttctccctacctattcaacatagtacttgaagtattagccagagcaattcgacaacaaaaggagatcaaggggatacaaattggaaaagatgaagtaaaaatatcactttttgaagatgatatgatagtatatataagtgaccctaaaaattccaccagagaactcctaaacctgataaatagcttcggtgaagtagctggatataaaattaactcaaacaagtcaatggactttctctacacaaagaataatcaggctgagaaagaaattagggaaacaacacccttctcaatagtcacaaaaaatataaaatatcttggcgtgactctaactaaggaagtgaaagatctgtataataaaaacttcaagtctctgaagaaagaaattaaagaagatctcagaatatggaaagatctcccatgctcatggattggcaggatcaacattgtaaaaatggctatcttgccaaaagcaatctacagattcaatgcaatccccatcaaaattccaactcaatttttccatgaattagaaagagcaatctgcaaattcatctggaataacaaaaaacctaggatagcaaaaactcttctcaaggataaaagaacttctggtggaatcaccatccctgacctaaagctttactacagatcaattgtgattaaaaactgcatggtactggtatagtgacatacaagtagaccaatggaatagaattgaagacccagaaatgaacccacacacctatggtcacttgatcttcctcagtggaagaaagacagcattttcaacaaatggtgctggcacaactggcggttatcatgtagaagaatgtgaattgatccatttctatctccttgtactaaggtcaaatctaagtggatcaaggaactccacataaaaccagagacactgaaacttatagaggagaaagtggggaaaagcctcgaagatatgggcacaggggaaaaattcctgaatagaacatcaatggcttgtgctgtaagatcgagaattgacaaatgggacctcatgaaactgcaaagcttctgcaaggcaaaagacattgtcaataagacaaaaaggccaccaacagattgggaaagaatctttacctatcctaaatcagataggggactaatatccaatatatataaagaactcaagaaggtgggctccagaaaatcaaataaccccattaaaaatggggctcagagctaaacaaagaattctcacctgagggataccgaatgcctgagaagcacctgaaaaaatgttcagcatccttaatcatcagggaaatgcaaatcaaaacaaccctgagattccatctcacaccagtcagaatggctaagatcaaaaattcaggtgacagcagatgctggcaaggatgtggagaaagaggaatactcctccattgttgctgggattgcaaggttatacaaccactctggaaatcagtctggcggatcctcagaaaattggacatagtactacgggaggatctcacaatacctctgaacctcagctctccctcaaggtggatcctgtcttccaacctttatatatgtacatttatgtagaagtaactgtgtaggtcccaggaaactagaaaggatcacgtgataaaggggaaaacggaatctttagtggaagtagaatgtctgtgattgaaaggggaatgctgggagtggagaggtgtgaggaagtgtggccaggacacagaggagaggagtcaacacaaactaaggatgcttgaaaacaccacacggaaacatgagttgtcataggggaacaaacataaagtaaacagtttaaatagacgaacctccagtaggtagaaaaagctgttaagtaaccctgagtcctgcaaaacacatgaaactgaagaagaatgaagaccaaagtgtggacactttgccccttcttagaattggaaataatcacccatggaaggagttacagagacaaagtttggagctgagacaaaaggatggatcatctagagactgccatatccagggatccatcccataattagcctccaaacgatgacaccattgcttacactagtaagcgtttgctgaaaggaccctgatatagctgtctcttgtgagactaggacagggcctagcaaatacataagtggatgctcacaatcagctattggatggatcacagggcccccaatggaggagctagagaaagtatccaaggagctaaagagatctgcaaccctgtaagtgcaacaacattatgaactaaccagtaccccggagctcttgactctagctgtgtatgtatcaaaagatggcctagtcggccatcactggaaagagaggcccattggacacccaaactttatatgccccagtacaggggaacgctatgggccaaaaagtgggaatgggtgggaaggtggttgggggggagggtatgggggacttttgggatagcattggaaatgtaattgaggaaaatacgtaataaaaaatattaaaagaaaaacaaaaaacttaagtatagattaatggaattataacatcaaaaataaattataatagtaaagttaaaaaaaaaaaagaatggcagtgatttgttcccattttaagagatacttcttctggtgatggatttgcctttcctgaaggtcaatgattcagacaaagtacaattttttggattaataagagcttttgtagtattccacatattgtttctgaccaaagaactcacttcatatagataaggaagtacaatgattgggttattagttacacttgtattgctgtgataaaataccatgaccagaagtaacttaaaagaaataaagtttatttttacttatggttacagagagctacatccagaatggcagggttggcatggtatcagacaggcatggcagcaggaacagggagctgggagctcacatagcaatcacacacagggagcagagagaaacaggaaattgggtgggggtgtaagccctcaaataccagccttgagatgtacttccttcagtaaggctgaacctagacattctatgatctccccaaactgcaccaccagctgttggtcgttgttgaaatgcacagacccatgaggaacatttctcattcaaaccaccatgttctccatcagcatgaagcaactgacttgaataaaaggtaggatggctttttgttgttgttgttgttgtttttgtttttttgagacagggtttctctgtgtcgccctggctgtcctggaattcactttgtagacaggctggccttgaactcagaaatctgcctgcctctacctcccaagtactgggattaaaggcatgcgccaccaccgcccagcaggatggctcttttttaaagaaatagatacagtgcaggaaaatgaataggaacagaaactatattgaggtaactgaacttcagctctccctcaaggtggatcctgtcttccaacatttatatatgtacatttatgtagaagtaactgtgtaggtcccaggaaactagaaaggatcacatgataaaggggaaaacggaatctttagtggaagtagaatgtctgtgattgaaaggggaatgctgggagtggagaggtgtgaggaagtgtggccaggacacagaggagaggagtcaacacaaactaaggatgcttgaaaacaccacacggaaacatgagttgtcataggggaacaaacataaagtaaacagtttaaatagacgaacctccagtaggtagaaaaagctgttaagtaaccctgagtcctgggttgtttaataaaaacctgtgtcagggataagattcttccctatgggttgttggtcaggagtctcatgggagggggcaagacctgcctctgctactgtttgctcaccaggactaggtagcaaaaccagattgctgaagatgccccatcttttgatcacaagacatagaaaaccaagttagaacttggctagaaatctcttccttgctggctatctcttccaaagccaaaaggtgctacgcaggctgttgggggagaattgttattcacactcttacttagctgtggaccctgtgcacaacaatactgacagactagataagataaacccaccagtacaatagtggttgtggttaggttttgtatcaaccaccaggaaggaattcacagttaaaggcctgtggttagggaggttagtttcccaatagggaagtactgctgttggtgtgctagatggacatgatgttcccattaagctgagtcctaataactgtttatgttcaggggataggagttatctgcttgggtcagtgagatttctttccacactggtcagtggtgtctgaagagatacaagtgctcaatgtactcaaaacaagtgaccacttatttattgtccagcaataaatgagacatctattaagtcatacaagactcagtgagtatcacagaaagagggtgggaagaatctctgagatggaggaagggtggtggtgatgttggtgatgctggttgggtgatgacttctgggaaagatatgactgctgcactctttgactcaccatagctatgattacctatgccagacgagtataacattagtcctgtacggtcaatattctatttagggaacaagagatacttgttgatcacacccctttctgagggtttatttatggtagttggtggttgatagggaaatgagacaactctacttcaggtatagatgttggcaaggtgctcatgaccctgtaaagaaaccttaatgaaattcactgggttgttaaaagaaaacaaacttgagacgtggaagtagaggagtggctagtttggaagagaaggaacattgttgggagtaggagacagaagaggatattagggctgaataggatcaaagttcattatgcacacccatgaaaaaataatgatttccatcctctgtttgtaattgatttatgttaataagaacatatctctggttctaccttgaaaaaaatgcagttatatagccagcaagctggctgcaggctggaatgctggggttctccagaaggtgcagtgtgctcaaatcagtgcccaatatatgctttttcccattactcaggcttcacaggtccaggatggagatgtggaaatggaaatggcacctcatcagcatcgccattgagccaccagccaaacttttgctttatgttccacaagcttatgctctgttggcctagaagttttgaccccagaagtgggggtgctttggtcaggagacatcccactgaagtggaagctaagactactctctagccacattggaagaaacaatacagttaggaggggtggttgacccagaccaaagggaaattggactctttccccacagtggaggtaaggaagatcatatcaaatgcaagagatctgcactgtgactaaagccaatgggaaactacaacaactcaacccaggtaggatgatacatcacccagacccttcaagagtgaaggcattggtcacctctccaagtaaaggaccaagaatgcctgatgtgcttgctgagggtggaaggactagggaatgggtgtagaagatagttctaactccagctaaggctatgaaatctgttatagaaatggggattgttagtgccaagaatgtttctgtcccaattgtgttcagactatgtttgagtagatagatgcatttattaagaaaatatctgtatttttattccttttgtgttcctttatccagtaatgtaatgactgagatgctatcagtcgttaaatgttcttaaatttatcttgtcatagttaaggcataggacaataaaagaccacattcctccagggaccttgccaattttctgaggaaaatacagtgcattttcactggtagtgagataactatatagcattggtctcaagtcagaaacatgttttgaagaagctcctcccctagagtgggtggcccttctcagtggtaaccacctacataaaaggaagtcttctgggggaaactctgctgtttgctggcctgcttcacttcctgctggtgagggtgttaatccttgctgcagctgtgcatcctcactgacatcagactccagtgtctccgggatccagtggacattgaagatcggtagctctccaggagtcttcaaagcaccaggtttggaagtgctgaggcttctggctttgtaacctgaacagctcccaggttccagccattgttggactgggctgtgtggacccatccagcacactgtaagtcattcttggaagccctctcttagatacacactctatgtgttcttttccttggagaaccttatctaaacaatctgttgatctgttgtttcccccaaacccccagcaatgctgggcacccagcacttcatcagctatcattttctctctcaatcttttccgcatagctcagtggggcctgttgtagaaaaaagataaagaacaatgctatatgacccttggtttgagagagtaagtgggttatatttcaacccaggtcctggggctctgggaggcccaacaattcattccaggtcctcccagacttcttgtttgtcatattgcctctttcctataatcatttacaacaagaaatcaaattctgcctttcactatttatcatattaatttgttgacaatctttctacttcttattcttaatggaagcatcagacttcttagacaggtcggttttgtgttttctgagaggatatggccgtaaaacttctcctttgcctcacatgactgacaaacaaatcagccagtgttagccttgagtttgtttttcagcaggtgataacaagatatggagaagtcaaagggaagaaagtctgtttcccaggccagagtggagaatggcatggagaacccaggcctggaactcatggtaattcactatggtggctgctgtgtggctcggctgctttctcagtctctagatcccctgacaggactctgcatggctgatctcatatttacctgctcttgtaggaaggcggaaatcttgaacaaagatacacacaggaggaagtgacacagggacacagcctggaggatggcttggggcattcctctctctggaggtaagggtggtctggattccagcttagttagcaaccaagaacctgggggtgggggccacgggaaaaaagtgactgagagagatcgaagctactcattcttagattgcttaactcacagacaccatcaggatcactgcatgttactacataagcatgtgtattttatagaattaactgaatgtcagcccatgacttagacaagcccatcagtgcctgctgggacaacattaagaaaagaatagcaaaggcaataacagtaaatggctaacattgattgagcactactatgatgaacaatggaccttgtacatttttgtagacacaaaatttcatccttttgttagcagtttaacagtcactaatgtaaattctatggtcagtctgcttagagccatagctgaactcggcccatgagtgtcctggttcgtttgttttgttttgtttttcttgtttgggtttggatctttgcttttctcttctttttctttcttctctttgctttttgataaaatgttactacatagttatagctggcttggtactcatttataagctagggtgccccgttggatttactggtatgctcttgcttcaaactcctgagggctgcgattaaattcttgctgttaagtacatgagtggaatttcatgctggtctagtgttacacaactgtcaactctgtaccttgaaggctgatacaggaagataagttctggtcttaatgagtgtaagaatagcctggatgctctttcacccctcccccccatcaaagttactttttcctctttaagcataatttagacatgaatgttattgatactttttgcttacctgccaaggatgattaccacttggcacactagtgtgctgatctgagacctccaccatcccacacagcaggactaatgatcctcaagggcttgaactctttatttttgtatgtgagtgcactgtcgcttcttcagacacaacagaagatgatatcagatctcattatagatgagtgtgagtcaccatgtggttcctggaattgaactcaggacctttggaagagtaatcagtgctcttatccactaagccatctttccagcccacgtttgaactctttaaattcttgttgagctttccacttcccactcaggcttattctcctctccttctgaacatgccttgcttgtcatccactgggataggtgtgggacttaagccctcagtctcctgttcctcagttattcaaatagcacctataattttccttgcaaaagaaataaacccaagggctcaggctgaaatgggcatggggcatagtcatgagagagaatagctttccttggaagactccactgcctgtcagaaacaaatgctacctccaatttcaggagagataagttctggaggaagaagctgagggtaggttagaaaacccactatgtaggttcttcatgtctgcctgtccatctacttatttatgtatctatatatcaatgtatctatgtgtttatttatgtatttatctatgtatctagtatctatgtatctatgtatttatttatatatgtatctattatttatgtacctatgtatttatgtatatatctattgatgtatatatgtatctatcatctatttatctatgtatctatctattcatctatcacctatctatctatctatctatctatctatctatctatctatctatctatctattgggacattcttattctgtcactcaggctggcctcaaaactcttctgggctcagctgggcatacagctgtgaatcatctcacctagcttggtgctttgtttctttagatttttggtattgcttctccacaacacagtaaagatcaaatactggctatcttctgtgagggctgtatcaagcaaggatgtgggtgttttgtggaggaaagtcttctcccagacaacacatctacggagactcggtagtggctatgttctggtttaggtcctttctcattgtatttggagtgagatgctttagaactagctatttccagctcctcatagctatcacctctgatttaaacgtgctggccttctctgatagactttgccctggctttctcctttttttggctttacacagtggttattagcctctggtttgtgtgtgagatgcagttgccattctcctttggatgctgtgtaaatttctctatttgctatgcaacaagataatccagctcttaggttcaaaaccagtcgtgtaaaaagaataactcatttgagctagcacagaatatctgtcagctgtgagagggctgtcctcccatatagacacttggaggtagaggcacagtgccagtgttcactcacctagcagttaaacgtctcaattcaatttctacttatagcaccgatacaagtgctcaaaccgtaccatcatgtaggtaagagcttggttctgttagcaaggtgctggaccaggcaagatacagagttcacggacccttgtgtgtgtgcttctgtgactgcttgtttagtttaaaaggttgcattgttttttctctttttcttttggatgtataatccatcatttttttttctttttcatactcagttccaacctggttttctaggattccattgttcatgggttttgcaaatatttaggtgatttctgaagtacttattgaacttcccaggaaatggtggtttgtggcgaggaggtaaaaccctaaggctttgctatctattgtctcttagactcatgcatgtcccctctcctttggagtggctttgcctaacaggtatgtatttgggcatagttttaagccagcttcaccatgtgaatcaggaaacaggtagcatatatattttttaaaagatttatttatttatttattatatgtaagtacactgtagctgtattcagacataccagaagagggcatcagctctcattaagtatggttgtgagctaccatgtggttcctgggatttgaactcaggacctttggaagagccgtcagtgctcttaacctctgagccatctctccagccccaggtagcatatttaaactagaataaccagaagagagtttactcataaagaggccattatgtgcaaataaagtataatgacaggtgtgtgaaaataccataataaaacccaatactgacctaaaaatagaattaagaaaaaacaaaaagaatggctagagaggtggctcagtggttaagtacatcactgctctttcagaggactctggatcagtactgagaggccacatccagtggcttacatctatctgtgatcttaactccataagctctggggcttcccctggcctctgcatgcacaatcctcacctccacaaatatacatgtaacaataacaaacaaagatggacatttgaaaatgttatgaagtagagctgagtcatgggaaggatggtacttgatctaaggtttgaaacagtgaacacaatctattcctagaccagaagggtatagtgcaacagaaccggtagtatagtcagatcagaatccctccctgcttagatgtgaactttatgtattgtgagctcttgtgaggtccgatgggcagaaactcactagacgagccaaggggtttggagctcagtggtatatcctcacagattgaactcccaggatcaaagcagggtagagtgaggacctggaggagcaactaaaagacctggatctcatggaaaaatctagagtcaaaagtgagagcattgctttgtgtactttgtgagtgatgttcagactgcaagagcagccacctccaggcttattagaggatcactgctgtcagctactgacattgtaaactttctgactcattacttttccactgcgcacagatggtgtcagaggccttgagatcccaaatatcctactgaattcatgggtttagataatccaagggtgatacagctttgctctttcttttacttccctgtatctgagcatgtacactctgttgaggcaagtcagggttagacttcctgcagaagataaggggagagaggtgagactgaagaaggaaggatataggggctatggttataacacgttcaagtgtaagttaagtgggataggcaccaatagaaaaggagtccaatactgtgtggaccaagaccccagaccatttagcagttggtcccaccagtgactaagcatcatacctttccaccatagtcagacaggtcacttctagctgggttcactttctttggagcttccaagagtatgggagtgggatgattttgcacacatagcttcagtgtgctaaggacacttaggttggcaaaggcagataatggggtcaggtaaggcacagcctcggatgatgatggagtgcttagattcaagagccaggctactcagagacaagctctcctcctgacaactactgtgaccttgggaaagttactcagcttcctggttttcagattgcaatagcaaccacctctaataaccagggttattagaggatcaatgttagtatttgcaactcctttgagcccaaacacatggaaaatactatacaaagcagtcttgagtagttcttgctgggcatcctctctcaggcctgtcaacctagagacccttgatgttagtgctgttttctctcctatccgccaaagtatgaagaactgctcaaagtgctagctctgtgtggtgttggggtgctgtgatagaatagcttctaagaaagacaggcagaatatgggaggcaagcaatgtctgtcctaggataaacacagaacatcatctatttctgtggtagaagacaccaatgacatagctactgtatgaggagtcagccttcctgacctgatgcacaggtgaaaagtcagagctggcctttggggaccccgttggagtactacaaacatctgcatctgattaattttctttattaactaagaacaatctttgcctggcccatcgagttcaaagaattgcacaaacaggatgaagtaatgctcacattttaattttggcttctcagcaggaggatttttcagcctttcacgaaggcgagaagtttctttgaaagacatgctggtttattcaaaaagatcctacttggtctcttgtgtttaggtgagatcatgagaattcatggaggggaaaacatgagcattttcacaactgttaactatgtcaaggctatggctgggtgaaaactaatcgtactcataagttaacctaaaggctctatgaggtacagatctaactgcctgtaggtaaaaataatttattgcctcagacccagaaggataagtgaaatccaaagataagctacagttcaaaatcacactatttgacaggtttaaattattaagaataaaaaaaaatcttttagttcacctcctttttagtgcttggatttgattcagggctcatatgtagtatttatgaacggcgcccttatgcataactcatttactgctttatatttaaaatcagtgctatacactatttttgaaagacagaaaaccttatttatgtatgctgtcaggggcatgtggagcattgattaggagtagctgggatggtgagatcacaaattatcctttggggtgaatctgaggcccagagggaagcatcatgtggcttttccttgtagtgctagtctccttacatggctttattcaagaaaaagttcaatcacttgacatctcaacattgctgcagtaaaaatcaaattaacaaagagatgtctaatttccagagtctgacagtggatgtggaccacatctaaggcagagactggggacaacagctaaaccagaatgggttgagactctcccaggagcagagaggaatggcttcattctgcatggaggctcggccttcctgacccccactcttccccttctcttcacagcatatactgcctacttcctggcagcgtgcatcctgaacttccagagggcactggccttgtttgtcatcacctgtcttgtgatcttcatcctggcttgccattttctgaaaaaattctttcctaaagaacaactaagatgcttgaagcctctggaaaacacccacctgaatctttgggcaaagcggtaagtgtgtcaatcagcttttgttgctgttcacaaagtacctaagaataatgcaaaagctatcctggctcccagtttcagaggcttagcgtacggttgcttagctccatcaatgttggctgctgatagggtagaatatcatggtgggaagtgaacaggtgaaataaactgttcacatcatggaggccaggaggcaaggatgtcagtagggtaagggtcctggcacaaggtgtcccagtaattgacctgcaccagttgggtctcaccttctatagtttcctccacctcctaacagtcctttaaattgtgaaagggtcagtggattaactcaccaatgagggctttcctttcccctccctttctctttcttgtcttttatttttctttatcatgagacaaggtctcttgtccagggtggtctcagaactctttatgtagccaaggatgtagcaaaggatgaccctggacttctgatatcctgccttcacctcttgagtgccaggattacacatgcactaccacactcagttcatggaatggtggggatttaagccaaggccttgtgcatcctagacaagagatggctgatcatcaaaaccatctcttgaataccttcttttgacagttcctgagtggcctccaggctcttacctatgcaaaggccaggttgcctcttcttgccctgtgatttagctccttcccctctagtcctccagagcccctctacctgtttttgtctttatagccccttagagcagtggctgtcaatattcctaatgctgtgacctctaaattaagttcttcatggtgtggtaacccccaaccagaaaatggtttcattgctaacctaattgcaattttgtcactgttatgtatcataattacatgatggttattataacgtaaatatctgatatgtatgttatctgatatatgactgcccgaaggcgtcttgtcgcacaggttgagaaacactcttagagtctaggcacaaacttgctcataaacataaatgaactgttttttcaattctatgtgtatgagtgttttgtctgcatgtatgcatgtgtgcctaatgcatgactggtaaccactgtgtacagaagagtgcatcagatccctttgggctcgagttacatacagatggctggtgaaccactgtgtgggtgctgggaattgatcctgagtccaccacaagcataagtattctcaggtgctcagccagttctccaatcccaaatcccaatcttaaaatcacattccttctgcctcctcttcctaaggtttgcagcacatgactgactccttatttatcttggtaagctagggattggacccagggtcttgtaacttctaggcgatgctctgctaagctatatctgcagcctctagtctatgtagtaaaggctttaagtccgtagatggtgtatttgatcctagcctttggagtggttaaaaaaggagtagcaatccacagggggaccagctcatcattttcttctgttttcagtatttggattagtcactggaagcaccttcatccttcatggatgagtctgtacatcacattttattgatatgtctgtatgagaaacgagaagttatgtggtttgtatcctcagatcagagacttatttatgtaaattgggagggggaagcagatgctagggagctaccagatgattctcaaggtccatctctgtctaacgaggaataagctcttgcattatctcagggattctctgactaggagcttctctgctgttcatcacctgagttggtgacagagtgttgtcattcctcctccagggtgtttataggactctctgttgttggcctcatcctctggctggctctcgacacagctcaaaggccagagcagctgatctcctttgcaggaatctgtatgttcatcctcatcctctttgcctgctccaaacaccacagtgcggtgagtttggggggggggggatttagcttgggcatagaaacacacagcaagggctatgtgattgtaaagtgtccgtgccaggtactcatgataaagacagagataaccaatattttctggaatcttcctctgacaggtttattcctatgcgagtttgaaagcttttagagacatttggtctgttaattgttactgtggtatatatgaatctagtcagcattaaagaaaaataaaatcaaataggaagaaaggaagaaagaaagaaaaagaaagaatggaagaaagaaaaaggaagaaagaaaggaaggcaggcaggcaggcaggaaggaaggaagaaaacagatcatgtcagagaatcatatggcattgtgcaggattgatgtttgcaaacgctatttgcatgtatgtgtctttactgtaatctaacttattttaaaaatcagtatggatatatttgcctatttacaatatcatcatactttttcttactcttcttcctgttccctgtgctatttttgtggtggaactccatggctgagagcgacttggagagtaaagggttttatttgtcttatgctttcccatcactgttcatcatcggaggaagtcagaacaggaactcaaacagggcgggatcctgaaggcaggagcggatgcagatgcaatggagtggtgctgctgactgtcttgctcaacatggcttgatcacgtgctttctcatagaacccaggactgccagcccaggagtggcatcactcacaatagactgggccctcttccatctaattaagaatgccatacagtcttgtttccagctcaatcttatggaggcatttctcaattgagattacttctccttagatgactttagtgtgtgtcaagttgacataaaactagccagcacagctacgttatctgagactgttaccaccctcactgagccccactcccagcacatggttgaattaggcaatggctgagcaaggtttgtaactcatgctggaatattttctttttggtcccaggtatgctggaggacggtgttttggggcctgggccttcagttcatctttggaattttggtcatcagaactgaacctggatttaatgcatttcaatggctgggagatcagatccaggtacagggagttgaatgtcagagtttttctttaccaggaaccccagagaaggttgattttagggaagcagagggctttggaactacaccgtaatgatggtgtggcagaatctggtcaggtaaagagagagagtaatggggttcaggtgagaatacagaatctagttgggtagagagaatagtggggttcaggtagtatataggatcttgttgggtaaagagagagagtgagttatggggttcaggtagtatacagaatgtggtcgggtaaagaaagagagtaatggggttcaggtgagaatgtaagtgtagagaagtgatttgctgagtctgtcatttcgtgaccaacttttgggacatggctcacaggtggtcacacctgagtccaatcccatctttctctgtggcccgcctgtcctaactcttgtcccttttcttcccacttcagattttcttggcttatactgtggaaggatccagttttgtttttggtgatacactggtccaaaatgtttttgcttttcaggtaaaacttgttttgtgggcaggaatgacaatgccagtgaaggacaggggaatagagatgggaacaatgtgtgtgttcacgagaccagaaagcatttaccaacttgatcctggagaggagtctactctttccccatgatccttaccattatgaaattggtttaaagtcgggtgcggggagaggctcaggaaatagtctgtgtttaatgctgatagtttgatagcctgtagtgcattctgagtttattcctaaactacactgcatccaattccctggtcattcccagagctctgtttagaagcctgcaagacctagctcatgacacactgagtacacacagtacaatctctcacatgctgcctctgttcttgttgcagtctctgccaatcattattttcttcggatgtgtgatgtctattctttactacctgggccttgtgcagtgggtgattcagaaggtgaggcatttggttttcacaaaaggaccttcagcttggatctttcagggggatgagtgagtttatacttacacgttgggggagaaagtaagtacataggatatggaaaatgagaaccaatttgaaaaggcaatctctctgaagcatcctggtatcaaatgattgcccaggcctgagataggctggaggcagaacatggtaagaagctctttcatactgggttgaatttgcttgttctagaagccccaaggcctgagctctggctaatatgtttgcaacttgttctgttactctgggccacactatttctccaggcttcagtttctttaacactaaatggaatagcagggaggggttttgttggacactattcaagactcctgctaatgttgaagatttatgtgtctggtttcttgtaggttgcctggttcctgcaaattaccatgggtaccactgctgcagagaccctggccgtggcaggaaacatctttgtggggatggtaagtaccctggagccttctgtttttctaatctctcaagaactgagagcttggcagagaacaaatttggaaagaggattttccctctcctgtccctcccaacctccttccttcctgtttttctaagacagggtctcatgtagtccaggctgacatcatactcactatgtagttgaggttgaacttgaattcttgattttcctgcttcccccgtctcaagtgctgaacatatacacatgtgtcatcacatggcttgaaaagctcatttttcttatggaagtcagataaatggagaacatggggcagtcagtctttatgaaagaatcctcagagggtcaaggagaactcgatgtctaatgcacagtccagacacactatccagcttcttatataggggaatgtcctagtctaagccttatccccctcaggagctgggaaggatggttgagctacctctggtttcttgctgtgattcaccgtgatttttctgaggtctctgaggaggcaatggcttgtcttgctcagaactgtcaggactcttcttcacacagcatctttctcagtgtatccatctgtgtggaagagcatgtgtttgtgtgcaatagacgtctttctctttgctgtgattaaataccttggaaaaaaaaggtgtattaagagaaaaaggattcattttgactcacggcttgagagtacagccaccctattgggaagagcttggtgacaggagcttaaggccactggtgcttgtgcccagcacccaggacccaagcctaggaaatgtcctaaccacttttagaatgggtctttctgctttaatctaattaaaataatctctcacaggctgacctatcaagataactcctcacaggcattcctagagtcattttgaggagattctatcaattattgataatcaacattaaccatttcagtgttaaatctgtgctattgactggtcaaatcaacattagggacaatagtttttcaaatgagtaagaagttaacaattggggtctttttctcccaaagccttgggctgtttatctgcttttgatctgttttcagagtacttttggattctcttatcatgaccttacattttgctaaaattatttataatcagttgaacttttccagctagacctaatcatctaagagcagggtccttgccttagtgctctactaagctaatccatcgttttgctgacactcattaaaggatacatgacctcatagattaagactaggtcatttcctccttgaatcttcctaattaataaaaattacagacatttcattaaaaaattatattttgtttaatgactctctctccctctctcatctctcctctcttctctgtctctctctctctgtctctctctctttcatatgtgtgtaagtagtcatgtatcatggctctcatatggaggtcagaggacaacttgtggatgccgggtttttctttccttatgggttctagatattgatatcaggtctccaggctgaactttgttgttggcttgacattattttcttattatttcatacagcattagcttagataagctattttcagttcctttaatacatgctctgtagacatctagtgtgtggtcagcaatggaactgtactctataatttactcactaagctcatggacttagacaccgaaaacaaagtaaatgaacaccagttgtctacagtattctataatatgctagaggaacacgtgaaaacaggacctcatggagatggttgggcaggtttttgtccactgactggaagggcatgtatctgatgggtccattctttgtctgggataagcactttgacttggggagtgataccctcttggtgtgtgactatttttctttgtttttagacagaggcgcctctgctcatccgtccctaccttgcagacatgaccatctctgaaatccatgcagtcatgactggaggctttgctaccatagcaggcacagtgttgggagccttcatatcctttggggtgaggcacggtcaacataattgctcatggtgcactcatgttgagccccacagtggtgctaatccccatctggcttcacagattgatgcatcatccttgatttctgcctcagtgatggctgccccttgtgcacttgccctgtccaaactggtatatccagaagtcgaagagtccaagttcaagagcaaggagggactgaagctgcctcgagggtgagctggggacagttcaggagatggtaaggtgtgctacctgaggaagcccagggtactagagacttccagcttccccaaagggaagaaggtctgtcactccatgtccccttttgctaccctgcttccagctaatcatttttagtctttgttttgtttggacttaaccttcccacctggcattagtgggatattatacaaatattctatgtccttggcatcagactttcatgcaataatatctgaatcacttcagagtaatctccactattataattacagaggattcccaacacccctcaaaatggctggctacccatttcttccattttacggtctatagggctgctcctctctgaggagctgagattaatgtagatagcatattctttctctgtgcccaataaccacagggaagagaggaatatcctggaagctgcaagcaatggagccacagatgccataagccttgttgctaatgttgcagccaacctgattgcctttctggctgtattggccttcatcaatgctaccctctcttggctgggggaaatggtggatatccatggactcagtttccaggtaaagtcttatatgtgttgggcatgttttcctgactctcagtaaactgaaagcctgaggaggagaaggaggtagaggaaggagaggcggctaagtgtctggagcagctcctggtgcctgacttctgttgtctactcttcctttcccttctttctcaggtcatctgctcctatgtcctaaggcccatggttttcatgatgggtgtacagtgggcagactgcccactggtggctgagatagtgggagtcaagttcttcataaatgaatttgtggcctaccagcaactgtctcagtacaagaacaaacgtctctctggagtagaagagtggatcaatggcgagaaacagtggatttctgtaagtgacaatccagcgaattacagagcgagaggtttgggccaggcatatctaagggaaggtacagcatgccacataaacattgtgggactgcaaatgtttctcagtgtcccagcctatgcatgagacaagcagaagcacatttgtcaggacccaagctcctgctccaggtctctgtgttagttctctcctgaaatctgacccaactttgatctatgagataattgttgcttccttacactaggacagtccaaagaacataccttctcctggatgtcctgatgaccctttatctacacattcaaacctctatgaaacaatttttctctcttagcatctctaggtcattttctctgtatctttaataagaaccctactgggcaaggagtctggtggtattaccatatcatgtcaatggttgtaagacaggggctggttgttttctgagtatcttttgtgcattctttagaatactgtaagaaagatttggtgtgccttggaacttctaacatggttctgagacccaccaggactaaatttatctacttgttttctcccctctaggtgaaagctgaaatcattacaacattttccctctgtggatttgccaatcttagttccataggaatcacactgggaggcttgagtgagttgttcaattccccaggtcctcaacatgccaggcagatccagcctttgctcactgcacagctgaggctagatagagaatctggagtgaagtggacctcgcaggccacctgtagctcagagctaatgcagtcagctcactatggcatatcctttacaaccaatgcttcatctgcctgctctcctttctgccaaggcacaaacaggttttatttttagtttcctacaaggaagaagctatgaacattatatttctatcttgctgttaaactgccaaaagttctttctgaaattaatcttcccaacagttttttcttttataagagtgatatttgcacaggaatttaaaaaagccaaaggaaaacaggagacaaagcagataagtggagtcagtgagcatcatatcttgctgggcaaaagctgagagtccagcagtacagagaagccattagtacgtgaagcagaggtgttcagggtgctgactgttagtgatggttgcaggaataccaggagaggggtggtggtcttggaggatgatctgtgtgtgggtgtgcatgtgtgcgtgcgtgtgtgtttgtgtgtgtctgtgtgtgtgtgtgtgtgtgtgtgtgtatgtggtggatctgtaggtgtgtttgtgtgtctctctgtgtgtatgtgtgtctcagaattccgagctgagcacttggaaaaacaaaattacaaagtctaagaagaaatataggaaaagagtgtgttaaaacgccacttctggcaataatatctggggtagattcactaaatttatgtccctgatagctaaggaagcaggtgaaacagtttcttttggtccttttcctctctgtaaaatactcatccacactgctgtatgtctgccaggtgttagctgtgactctggactgaggtgagatggatgctctcctgtccagtcctttggctcaaattctacatgtaattcctgaaacagtttctttttggtccttttcctctctataaaatactcatccacactgctgtatgtctgccacatgttagctgtgactctgggctgaagtgagatggatgctgtcctgtccagtcctttggctcaaattctacatgtaattccactctggacttactggtgtagacctcagctggctgacacaggcatctgtgcctatgggagcagctcagagtcctgcttgattgagatttatcttgaatgcattccagaaccactgaggtgagggtcagacatacaatccttgatccaggagaagtctgacttatgtgtcaagactaatgtatgtatgtatgcacctcttaaggaagctttagcaggcttaggtggtttgtcaaagaacactagtcatctggcctggttttttcattcttctaatggggactgatgtgtgaggaagacatcaattgctttctcttgttgtctacagcatccatgataccccagaggaagagtgacttgtgcaagattgtggtcagggccctcttcacaggtgcctgtgtttcctttatcagtgcctgcatggcaggtaggtgcctaagtattgtctctggcagagactacaggatctctctcagaatgtttatttaactaaccatctaccccacagacacctaatctacggcgttaccaactcccatccaagcaaaacagaacgttggagtgtatgtgtcaaatctgtctctttaaataactattatcttctccatgcaggaatcctctatgttcccagaggcgctgaaactgactgtgtctcattcctaaacacaaatttcaccaatagaacctatgagacatatgtgtgctgcagagagcttttccagaggtaggcaaacaccagggtttctgttccccccctagcatatcctcttatatgaagggaacttctggatgttgggagatggaggtcttgagtacagagtcttggaagctgtgtggagtgtatgagacacaacatggatgcttgtgattgatagtctggactcttttctcttagtaggttttatcttcattattagtcctactgtgtgtggcaggttccatttattggtgttgtatagcagaagggaaagaagtttggtctcttggttaagaagttcctgtgtttattgtgactgaaatgtatggagtagacaatgatgattttacagtcgtctaaaactcagattttttttccagatagaaataaagcagaccaggagaagacagattttaaattgaaaagataaacttgaattcagatagtgtgaaggttaccttgtttactatattctagaatatgaaaggaacctatcactgagcccaaggaacgagttttgggacacatagaaggaatgaggaagtagaatatttgatgtggtaaaagccaaaaaggtgcatgctggtagtagcctgcaggtgagtggggagagctctaggaagcaagactgaactgttatagaaaggccttgcatgaacacctcgaggagtccaattttgacctgcaggattctggaccccagcatggtgagctgtgctttatggaagggtgtttggtaacaaggagagcaaacacatcactgtaacagtcttagcaagagagtaagacacttaccagatacaggcaccacagaagggagagtcgataggagtgaccctcaacttcatagaagaaaggcccagggtgaagaggggaaagaatggtcttttctgacttgggtctgtgtgtccatcacaaggaggaacaagaaataggagagaaggctaaaggcatggcctcttctggttctggatatgttattttggaggtacctgagtgactggcatataaagtgagtcacaagtcaactggagtctgaggctcaggagagaggtcagatctggagcctgattaggaggcaatgtgtatgtccttgatgtgtccctgttcttaatcagatgttagctgtagaacaggttaagaaacaaagtaaaagtaagtgaattgcaaatttcatttattgttaaagcagaatttataaagtggctagattgtttgtctggtggagttctaatgtgtatattctcagtggattttctaaagacatattctaagaatggttggcatctagaagcccagagaaatattttcaggggctcaaataccatataaatccactcacaagtcagctggagtctggcttaagtagctgttcagatgcagctcttgcaggtggactaacaggctgctgtcctggagggcctgagttctatttccccatgcacactgagggcttccaaccacctacatctccagctccagagggtcccatgcttaagtcctctgcaggcacctgccctcacatgcacacacccacacctgcacatggaattagaatatgagaaaaataacagctggatttgtctttctttctgtctgtctgtctatatgtaatgataataaaaatagtggatattaacttgagagtagagtataatatgggagggattcaagagaggataaatgggaggggctggagggaggaacatgatggagagaagtgatataattctgtttcagtttgaatagaatgaaaatcaaaaattgagaaaaagagaaataactttgtctaattaatttgtagcaataaagtataaacagtatttctttctcaaaaggaaagtggccctagttatcagctttttttttttattaaattaaattctggatcatgtataaggtctaatttttttctcaactgtttggaaatgccagacatttgtaactgacctgaggttaggagctgggctctgggcagacaatggtcagggttctgttctagcgtcgactaaagcgtgagaagccaagttcgttcagttggatctcatgtcctggttatgacaacagatctatgcacagtaggtttgttctcagttatttggaaaacttgtcgattgttttgccttgtttgtgtctgacccctgtgcatctggttttatcatttcagtacttcgctgaatggcaccaacatgccttctttctcaggcccctggcaagacaacgtgtccagcctcaggaatcttgctagctgctgtgacctctataccagcactgtgtgtgcatgaggctggtgggccgctccaagacagttctcatagaacagattcatattaccaaatacattttcatgtacttcctattctctgagaaccccactaaactccacaaagtgaaatttctgagctcactatagctctgtataaaaatcagcccttacctttccagcggcatgacatgaaattccggttaccagacatgaaattcattatagaccctcttgagccaaagtatggtgggaatgtaactgaggggaaaatatgtgtgtggtgagggctaagatccaggttcaaccccgggcctggcccagagtggggagagtggggaaatcaaagtagatgcttagttttaacttgggaatggtggcaaaccccgtggtctcttacctgtaggctcacagctaaggggattacctcagattcaaggcaagcctggcccaaacatgacatgtcctcgtgtaggagtggatgtgaggggagatatttttaaagttatattggaaacgtgtgaatttaaagacacacattctttttgtattgccaaagacttataaacacaagagcttcttttattttcataaagaaataaaaatgattcctgtaataaagtgttgttttatttatttatttatttatttttttgaggcaaggtttctctgtgtagccctggctgtcctggaactcactctgtagaccaggctggtctcgaaatcagaaatctgcctgcctctgcctctcaagtgctgtgattaaaggcctgcaccaccactgcctggatataaagcattttttaaaaagtaagcatttttaaaattgtgcgtgtgagtacaggtgccagaggaatcctgagatgggagccacctggacctggaagtataggtggtcctgagacacccaatatgcatgctggggactacactcctgtctgctgcaggaacagtatacccttaaccactgaaccttcttgtaagccccaatacataaaatcctaaggaatatccataatttaccaggctcttattttgatttggtattctcattcagtgccagttacctgcagttcaggtttatctagaatcctttaaaatagttttggaccatctataagaattaccctacaaaaagctggccagatagcctgagttagaccccgggaggatttctctcaacagaaatgggtaaggggcacacatacaagggctacttaactttgtaactccagcaccctcactacagcactcacaccagggctatttaactgtctctccagcacctcactattcttggcttcagctcctcagtaaggggccaagtgtgggtgacatatgacttgaatctctgtgagcatgaggtcagattggtctacagggtgagcttcaggacagcctgggctacagagagagaccttgtctcaacaaatcagaaggaaaaacaaataaaaatgcaagagactctgctggatttatgatctggtgctggtgccatgctaaagaacccaggaacagcccagtggagggggtggcagaggcagtgccatagacagcaatgcttccacggagctacccagagcagtcacagatcacagagaggctgggtgtccaaaacatctaggaatgattgggtcatcatcaataggttagagggtaacctttctgtccaagtatgcaggcatgaatcagcaatcagaggcttgctgtgtcagaaatcaggtctgtactgccaccttttggaatctggagattggcctcaagtcttaaacctgtgtgctagcacctatacccattagtccatgttgtcaacccaagattgtttttctcatcactgtacactgtgtcatgccacctacccatgagcgtgatcattcagtcaccatacacaactactgagtttccttaaaaatccctaccttcctggtaagtgacccttcaaggtccctaccctctcaagtgaaaataactacagcttcatagaaggcttgctgtggaagatgcagtatctcctctctagcatcatcactgtgacacagagatgcatagcgagtgttggctctcatttctcctgccttcatttgattccatatctcctgtcctaagtttagcagtgctagaatgtggatgtttgtaccccacttcactcatgtattgagaccctgtccaggaagtgttagtattagaggtgagaacttagagtgtgtttaggtcatgtgggtggagctctcatgaatgggatccatgcaatgattgaagaatcagaaaacactttgtccttctgcctgttggtgagtgatgggcctgtatatggaatcgggtccttaaacaccaacctctgctgctctgatctgggatttctcagccttcagatttgtgaggaatacatttctattgtttaagtgcccttttgatttaaggtattttgtttctaatagatcaggcaaatgaaggcgaatactttttgcatatgtctaccatagacatattttactttctccaggggtacctggcaccctgccccacatatgcctaactcctctccttcctagtctcagaagggcaggattagaggatgggtccatttgggctggagtttgctgagggttacagactagaagtccttgctctggttaagatacaagtctaaagttcagaattgatggagccatatactgtcttaaataatgacggtaagccaaggagcaggggtaaccaggtcatcaaatggctccagtgggaatactagttccttggaatgacctgtcctggggatgagaggttggccaccaagggtgaagttgaggaagcatttcaagaagaagtagcaatttccaggattgcacgcagtgcaatttatccgagagatacctatggacagacacacatactgactgatagtgggacaggagtgttaatgcacctcaatcagaagcaagggtttaagtgagacaaaggtagacaacagcaaacaagaatgtgcccgtccgttctcagagaggattcttgtgtcagtcaagtaatagggtaggggctagcaacatggctcagtgtgtatcagtgctcgttacatttttttttttttttggtttttcgagacagggtttctctgtatagccctggctatcctggaactcactttgtagaccaggctggcctcgaactcagaaatccacctgcctctgcctcccgagtgctgggattaaaggcgtgcgccaccatgccttttttttgttttattatatgtaagtacactgtagctgtcctcagacactccagaagagggagtcagatctcgttatggatggttgtgagccaccatgtggttgctgggatttgaactcctgaccttcggaagagcagtcgggtgctcttacccactgagccatctcaccagccccatttttttttccattttttattaggtatttaactcatttacatttccaatgctatcccaaaagtcccccatatccacccaccccnnnnnnnnnnnnnnnnnnnnnnnnnnnnnnnnnnnnnnnnnnnnnnnnnnnnnnnnnnnnnnnnnnnnnnnnnnnnnnnnnnnnnnnnnnnnnnnnnnnnnnnnnnnnnnnnnnnnnnnnnnnnnnnnnnnnnnnnnnnnnnnnnnnnnnnnnnnnnnnnnnnnnnnnnnnnnnnnnnnnnnnnnnnnnnnnnnnnnnnnnnnnnnnnnnnnnnnnnnnnnnnnnnnnnnnnnnnnnnnnnnnnnnnnnnnnnnnnnnnnnnnnnnnnnnnnnnnnnnnnnnnnnnnnnnnnnnnnnnnnnnnnnnnnnnnnnnnnnnnnnnnnnnnnnnnnnnnnnnnnnnnnnnnnnnnnnnnnnnnnnnnnnnnnnnnnnnnnnnnnnnnnnnnnnnnnnnnnnnnnnnnnnnnnnnnnnnnnnnnnnnnnnnnnnnnnnnnnnnnnnnnnnnnnnnnnnnnnnnnnnnnnnnnnnnnnnnnnnnnnnnnnnnnnnnnnnnnnnnnnnnnnnnnnnnnnnnnnnnnnnnnnnnnnnnnnnnnnnnnnnnnnnnnnnnnnnnnnnnnnnnnnnnnnnnnnnnnnnnnnnnnnnnnnnnnnnnnnnnnnnnnnnnnnnnnnnnnnnnnnnnnnnnnnnnnnnnnnnnnnnnnnnnnnnnnnnnnnnnnnnnnnnnnnnnnnnnnnnnnnnnnnnnnnnnnnnnnnnnnnnnnnnnnnnnnnnnnnnnnnnnnnnnnnnnnnnnnnnnnnnnnnnnnnnnnnnnnnnnnnnnnnnnnnnnnnnnnnnnnnnnnnnnnnnnnnnnnnnnnnnnnnnnnnnnnnnnnnnnnnnnnnnnnnnnnnnnnnnnnnnnnnnnnnnnnnnnnnnnnnnnnnnnnnnnnnnnnnnnnnnnnnnnnnnnnnnnnnnnnnnnnnnnnnnnnnnnnnnnnnnnnnnnnnnnnnnnnnnnnnnnnnnnnnnnnnnnnnnnnnnnnnnnnnnnnnnnnnnnnnnnnnnnnnnnnnnnnnnnnnnnnnnnnnnnnnnnnnnnnnnnnnnnnnnnnnnnnnnnnnnnnnnnnnnnnnnnnnnnnnnnnnnnnnnnnnnnnnnnnnnnnnnnnnnnnnnnnnnnnnnnnnnnnnnnnnnnnnnnnnnnnnnnnnnnnnnnnnnnnnnnnnnnnnnnnnnnnnnnnnnnnnnnnnnnnnnnnnnnnnnnnnnnnnnnnnnnnnnnnnnnnnnnnnnnnnnnnnnnnnnnnnnnnnnnnnnnnnnnnnnnnnnnnnnnnnnnnnnnnnnnnnnnnnnnnnnnnnnnnnnnnnnnnnnnnnnnnnnnnnnnnnnnnnnnnnnnnnnnnnnnnnnnnnnnnnnnnnnnnnnnnnnnnnnnnnnnnnnnnnnnnnnnnnnnnnnnnnnnnnnnnnnnnnnnnnnnnnnnnnnnnnnnnnnnnnnnnnnnnnnnnnnnnnnnnnnnnnnnnnnnnnnnnnnnnnnnnnnnnnnnnnnnnnnnnnnnnnnnnnnnnnnnnnnnnnnnnnnnnnnnnnnnnnnnnnnnnnnnnnnnnnnnnnnnnnnnnnnnnnnnnnnnnnnnnnnnnnnnnnnnnnnnnnnnnnnnnnnnnnnnnnnnnnnnnnnnnnnnnnnnnnnnnnnnnnnnnnnnnnnnnnnnnnnnnnnnnnnnnnnnnnnnnnnnnnnnnnnnnnnnnnnnnnnnnnnnnnnnnnnnnnnnnnnnnnnnnnnnnnnnnnnnnnnnnnnnnnnnnnnnnnnnnnnnnnnnnnnnnnnnnnnnnnnnnnnnnnnnnnnnnnnnnnnnnnnnnnnnnnnnnnnnnnnnnnnnnnnnnnnnnnnnnnnnnnnnnnnnnnnnnnnnnnnnnnnnnnnnnnnnnnnnnnnnnnnnnnnnnnnnnnnnnnnnnnnnnnnnnnnnnnnnnnnnnnnnnnnnnnnnnnnnnnnnnnnnnnnnnnnnnnnnnnnnnnnnnnnnnnnnnnnnnnnnnnnnnnnnnnnnnnnnnnnnnnnnnnnnnnnnnnnnnnnnnnnnnnnnnnnnnnnnnnnnnnnnnnnnnnnnnnnnnnnnnnnnnnnnnnnnnnnnnnnnnnnnnnnnnnnnnnnnnnnnnnnnnnnnnnnnnnnnnnnnnnnnnnnnnnnnnnnnnnnnnnnnnnnnnnnnnnnnnnnnnnnnnnnnnnnnnnnnnnnnnnnnnnnnnnnnnnnnnnnnnnnnnnnnnnnnnnnnnnnnnnnnnnnnnnnnnnnnnnnnnnnnnnnnnnnnnnnnnnnnnnnnnnnnnnnnnnnnnnnnnnnnnnnnnnnnnnnnnnnnnnnnnnnnnnnnnnnnnnnnnnnnnnnnnnnnnnnnnnnnnnnnnnnnnnnnnnnnnnnnnnnnnnnnnnnnnnnnnnnnnnnnnnnnnnnnnnnnnnnnnnnnnnnnnnnnnnnnnnnnnnnnnnnnnnnnnnnnnnnnnnnnnnnnnnnnnnnnnnnnnnnnnnnnnnnnnnnnnnnnnnnnnnnnnnnnnnnnnnnnnnnnnnnnnnnnnnnnnnnnnnnnnnnnnnnnnnnnnnnnnnnnnnnnnnnnnnnnnnnnnnnnnnnnnnnnnnnnnnnnnnnnnnnnnnnnnnnnnnnnnnnnnnnnnnnnnnnnnnnnnnnnnnnnnnnnnnnnnnnnnnnnnnnnnnnnnnnnnnnnnnnnnnnnnnnnnnnnnnnnnnnnnnnnnnnnnnnnnnnnnnnnnnnnnnnnnnnnnnnnnnnnnnnnnnnnnnnnnnnnnnnnnnnnnnnnnnnnnnnnnnnnnnnnnnnnnnnnnnnnnnnnnnnnnnnnnnnnnnnnnnnnnnnnnnnnnnnnnnnnnnnnnnnnnnnnnnnnnnnnnnnnnnnnnnnnnnnnnnnnnnnnnnnnnnnnnnnnnnnnnnnnnnnnnnnnnnnnnnnnnnnnnnnnnnnnnnnnnnnnnnnnnnnnnnnnnnnnnnnnnnnnnnnnnnnnnnnnnnnnnnnnnnnnnnnnnnnnnnnnnnnnnnnnnnnnnnnnnnnnnnnnnnnnnnnnnnnnnnnnnnnnnnnnnnnnnnnnnnnnnnnnnnnnnnnnnnnnnnnnnnnnnnnnnnnnnnnnnnnnnnnnnnnnnnnnnnnnnnnnnnnnnnnnnnnnnnnnnnnnnnnnnnnnnnnnnnnnnnnnnnnnnnnnnnnnnnnnnnnnnnnnnnnnnnnnnnnnnnnnnnnnnnnnnnnnnnnnnnnnnnnnnnnnnnnnnnnnnnnnnnnnnnnnnnnnnnnnnnnnnnnnnnnnnnnnnnnnnnnnnnnnnnnnnnnnnnnnnnnnnnnnnnnnnnnnnnnnnnnnnnnnnnnnnnnnnnnnnnnnnnnnnnnnnnnnnnnnnnnnnnnnnnnnnnnnnnnnnnnnnnnnnnnnnnnnnnnnnnnnnnnnnnnnnnnnnnnnnnnnnnnnnnnnnnnnnnnnnnnnnnnnnnnnnnnnnnnnnnnnnnnnnnnnnnnnnnnnnnnnnnnnnnnnnnnnnnnnnnnnnnnnnnnnnnnnnnnnnnnnnnnnnnnnnnnnnnnnnnnnnnnnnnnnnnnnnnnnnnnnnnnnnnnnnnnnnnnnnnnnnnnnnnnnnnnnnnnnnnnnnnnnnnnnnnnnnnnnnnnnnnnnnnnnnnnnnnnnnnnnnnnnnnnnnnnnnnnnnnnnnnnnnnnnnnnnnnnnnnnnnnnnnnnnnnnnnnnnnnnnnnnnnnnnnnnnnnnnnnnnnnnnnnnnnnnnnnnnnnnnnnnnnnnnnnnnnnnnnnnnnnnnnnnnnnnnnnnnnnnnnnnnnnnnnnnnnnnnnnnnnnnnnnnnnnnnnnnnnnnnnnnnnnnnnnnnnnnnnnnnnnnnnnnnnnnnnnnnnnnnnnnnnnnnnnnnnnnnnnnnnnnnnnnnnnnnnnnnnnnnnnnnnnnnnnnnnnnnnnnnnnnnnnnnnnnnnnnnnnnnnnnnnnnnnnnnnnnnnnnnnnnnnnnnnnnnnnnnnnnnnnnnnnnnnnnnnnnnnnnnnnnnnnnnnnnnnnnnnnnnnnnnnnnnnnnnnnnnnnnnnnnnnnnnnnnnnnnnnnnnnnnnnnnnnnnnnnnnnnnnnnnnnnnnnnnnnnnnnnnnnnnnnnnnnnnnnnnnnnnnnnnnnnnnnnnnnnnnnnnnnnnnnnnnnnnnnnnnnnnnnnnnnnnnnnnnnnnnnnnnnnnnnnnnnnnnnnnnnnnnnnnnnnnnnnnnnnnnnnnnnnnnnnnnnnnnnnnnnnnnnnnnnnnnnnnnnnnnnnnnnnnnnnnnnnnnnnnnnnnnnnnnnnnnnnnnnnnnnnnnnnnnnnnnnnnnnnnnnnnnnnnnnnnnnnnnnnnnnnnnnnnnnnnnnnnnnnnnnnnnnnnnnnnnnnnnnnnnnnnnnnnnnnnnnnnnnnnnnnnnnnnnnnnnnnnnnnnnnnnnnnnnnnnnnnnnnnnnnnnnnnnnnnnnnnnnnnnnnnnnnnnnnnnnnnnnnnnnnnnnnnnnnnnnnnnnnnnnnnnnnnnnnnnnnnnnnnnnnnnnnnnnnnnnnnnnnnnnnnnnnnnnnnnnnnnnnnnnnnnnnnnnnnnnnnnnnnnnnnnnnnnnnnnnnnnnnnnnnnnnnnnnnnnnnnnnnnnnnnnnnnnnnnnnnnnnnnnnnnnnnnnnnnnnnnnnnnnnnnnnnnnnnnnnnnnnnnnnnnnnnnnnnnnnnnnnnnnnnnnnnnnnnnnnnnnnnnnnnnnnnnnnnnnnnnnnnnnnnnnnnnnnnnnnnnnnnnnnnnnnnnnnnnnnnnnnnnnnnnnnnnnnnnnnnnnnnnnnnnnnnnnnnnnnnnnnnnnnnnnnnnnnnnnnnnnnnnnnnnnnnnnnnnnnnnnnnnnnnnnnnnnnnnnnnnnnnnnnnnnnnnnnnnnnnnnnnnnnnnnnnnnnnnnnnnnnnncttgtattctgttgctgatgctcgcatctatggttccagatctctttcctagggtttctatctccagcgttgcctcgctttgggttttctttattgtgtctacttccccttttagttctagtatggttttgttcatttccatcacctgtttggctgtgttttcctgcttttctttaagagcctgtaactctttagcagtgctctcctgtaaatctttaagtgacttatgaaagtccttcttgatgtcctctatcatcatcatgagaaatgtttttaaatctgggtctagattttcggttgtgttggggtgcccaggactaggtggggtggggagtgctgcgttctgatgatggtgagtggtcttgatttctgttagtaggattcttacgtttgcctttcgccatctggtaatctctgaagctagctgttttagttgtcactgttaagagcttgttcttcaggtgactctgttagcctctatgagcagacctggagggtagcactctccttagtttcagtgggcagagtattctctgcaggcaagctctcttcttgcaaggcaggtacccagatatctggtgttcgaaccagactcctggcagaagttgtgttccactcactagaggtcttaggatcacgtgtggaatcctgtgtgggcccttgcgggtgtcaggcgactcagctggcaaggtagccggggctcaagtggagtggaaggggtttgtgccccagatcaagcccgggtagcctgcttccctatgtaccgcagtctcaagttccacgcgattggattggggtaggctctgtgttccactcaccagaggtcttagggtcccgtggggagtcccgtgtgggcccttgcgggtgttgggcaagactctgctggcaaggtagcccggggctcgagtctcgagtcgagcggaagggacttgtgccccagatcaggcccgggtagcctgcttccctatgtaccgcagtctcaagttccgcgcgattggattggggcaggcactgtggtccactcaccagaggtcttagggtcccgtggggagtcccgtgtgggcccttgcgggtgttgggcaaaactctgctggcaaggtagcccggggctcgagtctcgacccatttttttttaagagtaaatttttgtctctatctcaaggttggcctctgtggcagtcattgccagattagccatgactgtaagaattttccccacgtgtttggagaacgaaacaaaacaaaatacagcaaaatgtaaaacaagttaaaacaagttaagtttgcctattcatgtcagatagtctatggatgaataggtggtgttcaaaaccctcagagacctacggaagatgtcattaaaggatgttttattattttaaggatttttgggtatgagacatgtcacctccgtacatcacctccacttctacctcagagaagatgatgaacatcagagactccttatgtttgcttcaaatcgggcaggctgccaggaggcaaaattgttccttgattcaaccactgacaaaatgctgtccactatggacaaacatggacaaaaaatggacaaaatgaaggaaatatccttcattcaatgaggaattcaaatctgaatcatgttgccatggaaagctaatctttgccttgtgtttatgaagtactcagctccgtagacatgtttacctctcttgagggaacagcagctcctgacaagaagaaataggatttcagccaaattctcaggtctctatgctcattaaaaaatgcttcagctggacatggtggcacacgcctttaatcccagcactcgggaggcagaggcagaggcaggcagatttctgagttcgaagccagcttggtctacaaagtgagttccaggacagccagggctacacagagaaaccctgtctcgaaaaaaccaaaaaaaaaaaaaaaaaaaaaaaaaaacaaaacacacacacaaaaaaaccaaaccaaaccaaaccaaaaaacaaaacaaaacaaaacaaaaaaagagtagattcaataatctacctctttcccctattatttctatattattcctatctcttcctttctttctcttcaacccttttttccctccataagaaagaagtgatagagaaaagaaaaggaa

SEQ ID NO: 1211 - DNA, 2653 bp, Mus musculus
ctgtgcatcctcactgacatcagactccagtgtctccgggatccagtggacattgaagatcggtagctctccaggagtcttcaaagcaccaggtttggaagtgctgaggcttctggctttgtaacctgaacagctcccaggttccagccattgttggactgggctgtgtggacccatccagcacactcaggtgataacaagatatggagaagtcaaagggaagaaagtctgtttcccaggccagagtggagaatggcatggagaacccaggcctggaactcatggaaggcggaaatcttgaacaaagatacacacaggaggaagtgacacagggacacagcctggaggatggcttggggcattcctctctctggagcaggaggatttttcagcctttcacgaaggcgagaagtttctttgaaagacatgctggtttattcaaaaagatcctacttggtctcttgtgtttagcatatactgcctacttcctggcagcgtgcatcctgaacttccagagggcactggccttgtttgtcatcacctgtcttgtgatcttcatcctggcttgccattttctgaaaaaattctttcctaaagaacaactaagatgcttgaagcctctggaaaacacccacctgaatctttgggcaaagcgggtgtttataggactctctgttgttggcctcatcctctggctggctctcgacacagctcaaaggccagagcagctgatctcctttgcaggaatctgtatgttcatcctcatcctctttgcctgctccaaacaccacagtgcggtatgctggaggacggtgttttggggcctgggccttcagttcatctttggaattttggtcatcagaactgaacctggatttaatgcatttcaatggctgggagatcagatccagattttcttggcttatactgtggaaggatccagttttgtttttggtgatacactggtccaaaatgtttttgcttttcagtctctgccaatcattattttcttcggatgtgtgatgtctattctttactacctgggccttgtgcagtgggtgattcagaaggttgcctggttcctgcaaattaccatgggtaccactgctgcagagaccctggccgtggcaggaaacatctttgtggggatgacagaggcgcctctgctcatccgtccctaccttgcagacatgaccatctctgaaatccatgcagtcatgactggaggctttgctaccatagcaggcacagtgttgggagccttcatatcctttgggattgatgcatcatccttgatttctgcctcagtgatggctgccccttgtgcacttgccctgtccaaactggtatatccagaagtcgaagagtccaagttcaagagcaaggagggactgaagctgcctcgaggggaagagaggaatatcctggaagctgcaagcaatggagccacagatgccataagccttgttgctaatgttgcagccaacctgattgcctttctggctgtattggccttcatcaatgctaccctctcttggctgggggaaatggtggatatccatggactcagtttccaggtcatctgctcctatgtcctaaggcccatggttttcatgatgggtgtacagtgggcagactgcccactggtggctgagatagtgggagtcaagttcttcataaatgaatttgtggcctaccagcaactgtctcagtacaagaacaaacgtctctctggagtagaagagtggatcaatggcgagaaacagtggatttctgtgaaagctgaaatcattacaacattttccctctgtggatttgccaatcttagttccataggaatcacactgggaggcttgacatccatgataccccagaggaagagtgacttgtgcaagattgtggtcagggccctcttcacaggtgcctgtgtttcctttatcagtgcctgcatggcaggaatcctctatgttcccagaggcgctgaaactgactgtgtctcattcctaaacacaaatttcaccaatagaacctatgagacatatgtgtgctgcagagagcttttccagagtacttcgctgaatggcaccaacatgccttctttctcaggcccctggcaagacaacgtgtccagcctcaggaatcttgctagctgctgtgacctctataccagcactgtgtgtgcatgaggctggtgggccgctccaagacagttctcatagaacagattcatattaccaaatacattttcatgtacttcctattctctgagaaccccactaaactccacaaagtgaaatttctgagctcactatagctctgtataaaaatcagcccttacctttccagcggcatgacatgaaattccggttaccagacatgaaattcattatagaccctcttgagccaaagtatggtgggaatgtaactgaggggaaaatatgtgtgtggtgagggctaagatccaggttcaaccccgggcctggcccagagtggggagagtggggaaatcaaagtagatgcttagttttaacttgggaatggtggcaaaccccgtggtctcttacctgtaggctcacagctaaggggattacctcagattcaaggcaagcctggcccaaacatgacatgtcctcgtgtaggagtggatgtgagg

SEQ ID NO: 1212 - protein, 662 aa, Mus musculus
QDMEKSKGRKSVSQARVENGMENPGLELMEGGNLEQRYTQEEVTQGHSLEDGLGHSSLWSRRIFQPFTKARSFFERHAGLFKKILLGLLCLAYTAYFLAACILNFQRALALFVITCLVIFILACHFLKKFFPKEQLRCLKPLENTHLNLWAKRVFIGLSVVGLILWLALDTAQRPEQLISFAGICMFILILFACSKHHSAVCWRTVFWGLGLQFIFGILVIRTEPGFNAFQWLGDQIQIFLAYTVEGSSFVFGDTLVQNVFAFQSLPIIIFFGCVMSILYYLGLVQWVIQKVAWFLQITMGTTAAETLAVAGNIFVGMTEAPLLIRPYLADMTISEIHAVMTGGFATIAGTVLGAFISFGIDASSLISASVMAAPCALALSKLVYPEVEESKFKSKEGLKLPRGEERNILEAASNGATDAISLVANVAANLIAFLAVLAFINATLSWLGEMVDIHGLSFQVICSYVLRPMVFMMGVQWADCPLVAEIVGVKFFINEFVAYQQLSQYKNKRLSGVEEWINGEKQWISVKAEIITTFSLCGFANLSSIGITLGGLTSMIPQRKSDLCKIVVRALFTGACVSFISACMAGILYVPRGAETDCVSFLNTNFTNRTYETYVCCRELFQSTSLNGTNMPSFSGPWQDNVSSLRNLASCCDLYTSTVCA

SEQ ID NO: 1213 - DNA, 43709 bp, Homo sapiens
tcacaattaccccccaccacggcacaataactgccgcaccaggcttaagtaattaacaaacttactttcagcctgacccatattttcctgaggttaccctggaattctccaagtgccctacttacccatagagcctgaagtaaaaacgtactcaggcatccttcatcagtcgtcctccactttccacactctggcgtttcttcactggattatttgtagagattatggggagccccatgttgggcgccagatgttggggaaaccagccccacatcacccagcgggtacactgagtctagaggaaacaaaggagttagaaagagacagaatagcgtttaaaaggcgggtccaggggactggagcatcggaggcttgctcacagcccagagctctcaggctctgccccaatttatcggtttacaagctctttgttcttagggcagatgggagggggaggaagggatgaggaaaaggattaatcagtgaaggagaactcatgagtcattcgataagatgtatagcagtggcggtttctgtgaatttccttgaacaaaggcgtgtgtctaaactacttaagatcttgaacttatcgggactgaaatgggttggagcaggtttcaggaggagccaagatgtttgattatactccactgcttcaagggagtgttatctccctgagcaacctgtggaatgccactgagcagttatgctcttcgggcataaagacatgaaggcaataaggagacttttctcctcagaggccgcccatggcttcccatgtgtgtctcacacaggggagtccaactcaactggcacctcagaaactctctttctcacaggtctcgaactcttgacctcaggtgatccaccttcctaggcctcccaaagtgttgggattacaggtgtgagccactgcacccagctaaaacaggtattttaatacatcccttatacattaacttatgttaaagaaggtagaggaagtaatgagcttgatggagatataaatgaaagacataaaaagagatttgaaatagaactctgggccaggtgtggtggctcatgcctataattctagcactttgggaggctgaggtgggtggattgtctcagctcaggagtccgagtccagcctgggcaacatagtgaaaccccatctctaaaaatacaaaaaattagctgggcatggcagtgtgtgcctgtaatcccagctacttgggaggctgagacaagagaatcacttgaatccagaggcaaaggttgcagtgagccgagatcatgccattacactctagcttggccgacagagtgagactccacctcaaaaaaaaaaaagaaagaaaaaaagaaatagaacctctgaatatgaaaaatacaacatctgaaatgaaaagtacactggataggattaatagcagcttagacatcatagaagaaaaatcaaactgaaagatacagagaaaaaaagactggaagaaacagcgagaacaccatattagagattcatgaaatatcattaagtggcctggtgtacatttaatttgagtcccagaaagaagagataaaaggggaagatagaactcctagggtcaaacaatcctcccacctcagcctccaaagtagctgagaatatagatgtgcaccatgacactgggatttgacttgtttttaagttcactgattctcttcttagttaagctgagtctgccaataagcctgtcagagctattcttcatatttgttaccatgtttttttatttttagcactttcatttggtcctttcttatagttttcttctctcctgacagtcctttttttttttttttttttttttttttttttttttttttgagatggagtctcactgtgttgcccaggctggagtgcagtggcacaatcctgactcactgcaacctccacctcccaggttcaagtgattctcctgcctcagtctcttaagtagctgaggctataggtacgtgccaccatgcctggctaatttttgtgtagttttagtagaggtgagctttcaccatgttggccaggctgatctcaaactcctgacctctagtgatctgcctgcctcggcctcctaaagtattgggattgcaggcatgagccatgtcgcccagtcagtcctcatctctttatgcatgttttcctccttttccactacagcctttaacatgttaatcttaattattttaaattctccatataataagtggattattttaaaggtcttcatcctcattgtcttcacatcaaataggctgaggaggagaaggaaggggaggggttggtcttgctatctgaggagcggcagaggcagaagaaaatctgcatgtaagcagacccacacaattcaaatccgtgctgttcaagggtcaactgtagttggaagctatgatgatggttttagtgtatacttttagtagaatgatgtagttaattttgtataattaactgcatttatgagtctttaaacttaaaaatgataaggaaaactatctccttagttttaaagttgctttaacaggcagggcaaggtggcttacacctgcaatcccagcactttgggaggccaaggtgggtgttcaggagttcaagaccagccttgaggtcaggagttcaagatcagcctggccaatatggcgaaaccccaactctactaaaaatacaaaaattagctgggtgtggtggtgggtgcctgtaatcccagctactggggggctgaggcaggagaatcgcttgaacctgggaggtggaggttgcagtgagccaaggctgtgccactgcattccagcctggatgagagagcaagatgccatctcaaataaataaaaataaataaataaagttgctttaacagtttataaaaataaaaatcacctactttttcagttaaaaataaataaatcttcccacgtaacagtcataacatatggattatatctgattccggttggtcattgcattatctcttgatagtgtggtttttgtttgtttttccttttttgtcataagtattttggttgtaggccagacatcttgtgtagaacagtagagactgggacaaattgcttttatgccagaaaatgggcatatgcttttgtgttagtccattcttgcattgctatggagaaatatctgagagtgggtaatttataaagagaagaggtttaattggctcatggttccgaagcttgtacaggaagcatgatgttagtcatctgttcagcttctaaggaggcctcaggaaacttacaatcatggcagaaggcaaaggggaagcaggctcatcttacatggccagagcaggagaaagagagagagggggaggtgctgcacaccagatctcatgagaattcactcacatacagtaccaagggaagatggtgctaaaccattcatgagaactctgtcctcacgagccaatcacccccaaccatgccccacctctagctttgaggattatatatatattttttgagacagagtttcactgtgtcacccaggctggagttcagtggctcgatcttggcctactgcaacctccgcctcctgggttcaagcaattctcctgcctcagccaccatgcccagctaatgtttgtatttttagtagagacaggttttgctatgttggccagactggtctcgaactcctgacctcaagtgatcctcccgcctcagcctcccaaagtgttgggattacaggtgtgagccactgagcctggcctggggataacatttcaacatgagatttgggtggggacacagatccaaatcatactagtttttttttttttttttttttttaagacagggtcttgctctatcacccagtctggagtgcagtgatacaaacctggctcactgcagcctggaattcctgggctcaaaggattttcccacttcaacctcctgagtagctagtactacaggcatatggcaccatgcctggcaaatgttagccttttttttctttttgtagaaacagggtctcactatattgcccaggttggtctcaaactcctgccctcgagtgatactactgcctcagtttcccaaagcactaagattacaggtttgagctaccatgctcagctaggcgtgtgctttctttagctaaatccttagtgtttggggttgagtcgatctagtgaaaagttgagctggatttgttgaattgagttggtggcttgtatgaagatttttctcaataactgcttgagcttcagctttaagtcttttctttgcacctatgccttagagaaggccctctccacacattcccccgcccgctttacagaagtaaatgcctgttactttctactcaactcttgctatcctggtgtggaaaaggagagtgccctctgttttacaggctcatcctcaatcttacacaggtgttatgtccctgggtcttaaaggtggggcattatcagcaatcgtccctccatcagcaataggaaatctctaatggccttggtccagggcagttttctgcctctctttcagaggtagaaatttttttttctgttcacttctctcagcaatgagtcttcacctgtggcccaagggtggcaaatttttttcccctctcccagtgatccaaggcagttttgcaggggagataaatgagaacaatccaggtagagctttgtgtctttcctgcagtgatagctgctcacctttcctaggcctgcaccatgaggggaactttcccaagtctcctgttttgcccatggtctttcttctttttttttttttcaacttgcattgcctctgacccaagtcagtagcaacctttattacttataaagatttttaaacatttccattgtatttacaacacaaattttaggcaacacactcctatgaatgtgatggttttaatggttaatacctatccaagtaaaaaaattatgctttaatgtggaaagaattttagcctgggcaacaaacatagtgagaccccatctctgctaaaaaaaaaaaaaaaaaaaaaaaaaaaaaaaactaaaaaattagccaggcatggtggctcacacctgtagcctcagctacttgagaggctgaggtgggaggattgcttgagcccagaagatcgaggctgcagtgagccaagattgtgcaccgtactccagcctgggcaacagagtgagaccctgtctcaaaaaaaaaaaaaaaaaaaagaacaaggtagagggatttgagaggtgtgtatttctgtattctggcttttttttttgagacagggtctcactctgtcacccaggctggcgtgcagtggcacagtttcggctcactgcaacctccacctcctgggttcaagtgattctcctgcctcagcctcccgagtagctgggattacaagcatgcaccactgcgcccagcttattttgtatttttagtagagacaaggttttgccatgttggccaggctggtctttaacccctgacctcaggtgatccacctgcctcaccctcccaaagtgctgggattacaggcgtgagccactgtgcccggcccgtctttttttggtgttgttttttaattcttttttttttttggagacagagtctcgctctgttgctcaggctggagtgcagtggcatgatctcagctcactgcaacctctgcctcccgggttcaagtgatcctcccaccccagcctcccaagtagttgggactacaggtgtgcatcaccacagctggctaattttttgaatttttagtagaggtggggtttcaccatgttggctaggctggtctcaaactcctgacctcaggtgattcacccacctcggcctctcaaagttctgggagtacaggcatgagccaccacacccggcccgtggttcttttctttttattattctcccaaaaagtgcagccattttggctgtcccaaatattgtttgtctgcattctgatttgaaaaataaagtgtcctcaaaataggagctaggatgaatgtggagctggagcacaaatcctttttttttttgaccgggtctccctctgttgccaaggttggagtgcagtggcatgatcacaactcactgcagccttgaactcctgggctcaagcgagcctcctgcctcagcctcctgagtagctgggactacaggcatgcaccgccacccccagccatgtttcccaggctggtctcaaattcctggactcaagagatccttgtgcctcggcctcccaaaatgctggggttacaggcctgagccagccctgccagagctcaactctcttgggcttctctcaaggattgtagacttctcaagtcctgctgctactggttgctctgcaatgccttcaaacttattttatatattttgtccagtctttttagttgttttcaacaggagggtgagttaaatgccagctactctattaagaccaaaattttaagtccctatactctccctagttctgcctgcttctacagtaattgaaggagatataaaagcagaaaggataaaaccatctattacttacatcgtatttatttcccagatgggttttggcaggccacctcattttccaggagtaacctctaggctttaggagagttacaacctttaggacagttgtaagtttcaacttccacagaaatgaccagagctagcctctcatcctggctctcccctaactaactgtatgactttaggcaaattcctcatcttctttgagtctatttttttttcttttgatctaaaataggattagtagctaacttgcttaccttacaggaatattacaaggatagtgaaagtatagaaaaatcttttgaaagactataaaatgctgtagaaacagaggatctcttatttatgtttaaccttgcagcccagaaatagcttagaactgggagtaagggactcaggatatagaattggcttagtcactaactaaggttttgactctgggtaaatcactttattcttcctgatctgtaatatgagaaagttcatccatcaaactatatgtgataaggcaaaaaacaaacaatggggcccaagtcagttaatcaaggggaggtacctgctaggttaaatcttttcctcttggcagttgggttatgtcaatatttgtgtttaaaaaaaaatctggatcccttgggaaagtgagaggagtactatggcctgcacttagaagatgaagatatgggtttttacatcttctataaggaaagaaaaagggaagtgggagggtgagagaagacagaggtgtgatcactggcatcatttcacctgaacagaatactaggatctgtgcctatcattatgcttggacttagccccggaagtggcaattatttaaggtaaaaactgttggggcgtggtgactggagcctgtatcccaacactttgggaggcctaggtgggaagattgcttgaggccaggagttcgaaaccagcctgggcaatatagtgagaatcctgggtctaccgaataaaaatttaaaaattagctggatgtggtggcacacacctatagtcctagctcctcaggaggctgaggcaggaggaccacttgagcccaggagtttcaggctgcagtaagctatgatctcaccactgaactccagcttggatgacaaagcaagaccctgtctctaaaataaatacatacatatgtacacaaataaggtaaaaataaaaaaaagatataagatatatatccttttgtaatcttatatatttttgtatacattctatcttatacatatatcttatatatatataagatttacaggtatatatgtatttaaaaatatacaaaaagatataagatacatgtataagatagaatgagcaagagacacttcacagtcatattgacatataggacaacagcttgaaaatatctgtaagcaggttcactttcaacactggtgtcttattttcctgaattaatataagatcttacaacagtgctccacaattgcaaagtcatgtaatatttttccaagttctttcttctgtattaaattacttaattttcatgataatcttatgagataggattaggcagggtgggaaagatggaagaggcccagaaaggtaaagtgagttgctctcgatccagaatacaacacacatctactctgtgagggattctgtgtacgtctgcgcacatacacatgcagaactggggaaacagaaatatgtccttactttggtgattggaatccgcatctacataccaaataatctaagccagaatctgtggtggtgatgttgttttcacgtattttacaaatatttattgattgcctaataatattgtggtgggccttgagcctagggatacagtgaagaacaagatagagaacctggccaggagcagtggctcacacccataatcccagtactttgagaggccaaggcaggaggatggcttgagcccaggagtttgagaccagactgggcaacatattgagacccctatccccacagaaaattaaaaaaagacttagccaggtgtggtggtacacgcctgtggtcccagctactccagaggctgagatgggaggatcacctgagcccagaagttagaggctgcaatgagccatgatagtgccattgcactctagtctgggtgacagagcaagaccttgtctaaggaaaaaaaaaaaaaaaagacagagagcttgtgcttgaggagatcactgtctagtaggcgatggtatgtgctctatagggttcagcaacaacatggtgcaatcagagtgcagggaggggtcctaagttttatccagagggcgtcataggaagctttctttctttctttccaggccaggataagtgttaccagctctgtaaagtctttctctccctcttttttttttttttttttttttttgagatggagtctcgctcacccaggctggagtgcagtggcatgatcatggctcactgcaacctctgcctcctgggttcaaatgattctcctgcctcagcctcctgagtagctgagattacaagcctgcaccaccatgcccggataatttttgtatttttagtagagatggagtttcgccatgttggccagggtggtctcgagcgcctgacctcaaatgatccgcctgcctctgcctcccagtgtgctgggattacaagcgtgattcaccgcgctcgacctgcaaagcctttcttgacacatccgtctttcctcactgatctgttcgttttttgatggcagagaccttgtctcactcatttttatgtcctcacacggaaaacggtggctggctaatagtggttactcaataagtatttgttgaatggattaataaaataattcctagcagtcatttggcatggaatcatgtacagtcgtgctgtttattgttttctagggcatgtctttccagcacaaaatgatggtaaattttctgggtgcagagacggctcttactgtattttacaggctacccagtgcctagtccagtggtgggtaatgcttacaggaatgtacctgttagaagttcttacagaattcttttgttttgttttgttttctgacagggtctcactctgtcgcccaggctggagtgcagtggcgcaatcacagctcactgcaacctccacctccagaggctcaagggatccttccacctccgcctgccgagtaactggaaccacagtcgtgtgccaccgcgcccagctaatttttgtatttgttgtagagatgtggtttcgccatgttatcctggctggtctcaagcgatccgcccgtctcggcctcccgaagtgctgggattacgggcgggcgccacctctgcataagtcttaggcctgcaaaacagtcttaaaaacatataatatttaacttgagaggtgcagtcctcctctacagtgagggcaggctcagcgaaggagggcccaagacataaaactaaccaatggcaggaaagcccccatgccccacccaagctgcccctcctccctcgcagctgagcttttctttcagtccttcactgaggagccagagggaatcaattccacaagctggggtaagtaaaggtgtttgggggagggcaggtgcctaatttacaaatttttaaagagatcatatttaaactaaatgcaggtagttttgtgcctagtcaggaaggccctaatttacacaatataagttggttatgtgtgtttaatgaaattatacttcaaatgcttgaagagatcacattttcaaaagcaattccatggggaagggaattttctgcaaagtaaataaatatctcagaatgaacttatattctaattgtgaatgtccatgtattaaatttgcttattctgaggcccaaatgtttgcttattttgtttaaaaactttacttgggatcattaacattcatactaattattttaaatgtaagttttgttaatttcactgatgagttctctctggggcataaaaaaccaattcttatgctacattatagtcaggaatttgaaggcctgtaaattgttatctgttcagcaatactttagggtccgggtcttcccaactgccttcctccctgtttccttcttactcagcaagctcagtggggcctccctggggctaaaaggagtagttaccctgtgactctttctttgagggtccaagtaggaacctttatagcccagatcctggggccctgggcggcccactgattcatttcaattccactgcctttcatttctcttctcctatcttactgcctcttctttagctattcacaagaggaaataggattttatttttcattatttattatataaaaattacacatccaatcttctcaattctcagttcttaaagaaatcaactaagccttcaaagacttttagttttgcgttttccatgggtaactggtcctaaaaattctccccatccccacagaacagaatgaccaatctttcaggcttggcctgaatttgtttttcagttgaggagaacaggagatggagaaagcaagtggaagacagtccattgctctgtccacagtggagactggcacagtgaacctggggctggagctcatggtaatcaccagtttagtttctctctgcagagctgtgggctgctgcatgggctcctgtagggtatttggctgctctcaatccccatcatccctggcagggctccatgactgatcccaatgctctctgtgcttgtaggaaaaagaagtagagcctgagggaagcaagaggactgacgcacaaggacacagcctgggggatggactgggcccttccacttaccagaggtactggtgttttggaatcttgttcagttaggaaaggatctagggtgggctgccccttcaggcagcttgtggtattatcacaaccgctccaccttaccatgtgtacatatatatatgtatcttacataattaattaacttaaacatgtgccataaactccataaaaaaaaaggagttcagcagtatcagtgttggttggactgaaaataaaaataataacaatggtaataatggctaacagattttgagtgtatacttactattttgcagattgctttatgttatacatttattttcattacaacaggtaggtattcattttaatccctttagaaattaatttaccatatcattaaaaaaacagtagctcttctggaatactcagatttgggaatggtggagaggaagggaaacctggggagaaaacacagaaggacttattataaggataataaagacagtaaaaaagatcttagaagtcaaaagagaagagtctcaagaatgaagaaggtacagtccacagtgctatgtgaacaggggtctaggaaggaggagtgagaaaaatctttgaatttgtttgtggatctggtcccagaagtaatgtcaaagaaaattgtttgagtaaaatagatcatatggaaagaagcaatgttccatggcctggaaaacagtgggtatttataaaagagtgcagaagtcatacactaaaagctgagaagagaggacattggatagcttctaaagggaatacggtcatgagctacataatgatgtttcagtcaatgatggaccgcattatacaatggtgtataatcatgtatatcaacggtgtatatcattacacaacggtggtcccataaaattataatactgtatttttactgtaccttttctatgtttagatatgtttagatacacaaatacttaccattgtgctatagttacctacagtattaagtacagaaacatgctgaacagatttgcagcctaagaataataggatccaccatatagcttggatgtgtcgtaagctataccatctaggtttgcataagtacactgtaagatgttagcataattatgaaattgactaatgttgaatttatcagaatgtatccctgttgttaagtaacacatgactatatatggagatgattcagagcagcttccaaacaaaaggttatttttatattttcttctctttatttttgaaagttacctcagtgacttcttaaaatttttaattgttttattcacaatttgcttctctctaaaaatttttatattatcatgttttatatatactgaattgacagtaaactctttgtaagtttttcatgcttacatgatatttcatattttacttagcagtgtggtcgttaatcatgtgagtcacactgcttgggtctatatttgaacagtggtatgctagtaaatgtttaagaattgactctccaccgggctagtggctcatgcctgtaatcccagcacttcgtgaggctgaggtgagaggatcacttgagccaaggaattcaagaccagcctgagcaacatagtgagacccgcctctacaaaaatttttaaaaattagcagggcatggtggtgcatgcctgtagtcccagctattccaggaggccgaggtgggaggatcacttgagcccaggaggttaaggctgcagtgggccatgatcgtgccactgtactccagcctaggggacagagtgagaccgtcttgaaaaaaaaaaaaagaagaaagaaccggctgtccacatgtagttttgcaatgaatgttggttaatatttttgctcaccttaatgaggagtaagaccaggggttggcaaacttttcctgtaaaagataaggtagtaaatattattggttttgtggctgatgtggtctctgttgcaattattaaactctaccattttcgtaggaaagcagccacaggtgatactaaacaaatgagcatggctgtgttttgataaaacttaatttttaaaaagaaggtgagatgaacttggcccacagaccacagcttgctaatctttagtctagatgaaataataaattaagaccttatttacagtattcgcctgtaacgtaaaaactctcaacatggctgatttcaagtaaccaaagggttacttgaacaaggagttgggaagagatgtatcattatataaaatttccaccatacacatacagcagacatgaataacttcatgagctcacatgacagaaaaatgtagcaaaataattagaaaatgatgagtttttagtatttattacctttgtctttaatgtaatttaattatacatttatatagttttaatttttagtaatggcttgcacaattcctgaaaatgtaacaatcacttctctcaagccagcgcaggccagcttcccctgcaccactgactctagcacttaccagattttgggcaagttatttaccctctctaaacctcagttttcaccctgtaaaacaagaataatattagtacttagctgaaaggatcttggtaatttttttttgccagactgttgttggcaccttaaactgctctgatatataacatgtccagttcccttcaagtcttatcgaccttatattttctcatataaaccatgttaactagttacatagatataaaatcatgccttaaagttctaacttgcatttatttttattttttgagaaatgaggtcttacttcattacccaggctggtcttgaattgctgggcccaaacaatcctcatgtctcagcctcccaaagtgctgagattacaggtgtgagccatgtgcctgaccttaacttgcatttctttaaatttttgtaaagctacacattttcctccatttgccttactttccatatttctacgtgtgattttcttttctttttttttggaaatggagtctcactctgtcatccaggctggagtgcagtggtgtgatcactgcaacctccacctcccgggttcaagcgattctcctgtctcagcctcccgagtagctgggattacacgtgctaccacacccagctaattttttttttgtatttttagtagagatggtgtttcaccatcttggccaggctggtcttgaactcctgacctcaggtgatctgcccacctcagcctcccaaagtgctgggattataggcgtgaaccactgtggccggcctacttttctttatcaactaaagtaagttctggattttgaacctcatttccttcctcctgaccaactctaatagaacccacatagatttcttgtttccagttctccccacctcctgccaatctatcctatatagcttctaccaaaactacctaaagtatgtctgaactcccttatatcacaaacctctgtagctctccagttgctcctgaacaaagccaaactccacagcctggtattcaattctccccaaaacctcttccccacaaccaggatctgtatccaacttgactttccaacattaactcttgcaattccctttctaatgccaccctatgctctagtgaaagtcaactatcaattgttccttatatgtaatccccagtttcctgcctccatgtcatgcatgtcattacatcattgcttatgagtgtactgtcttcattttttgtctttgtgcccaaatacaacacatattttaaggctcaactcaagagcaatcatgtccatgaaactttctctgatgctgcctctcctcacctcaacctcactggccccagtactaaaaggtcccttctttctccaaacttccataacattctatctgaccctctcttataacactttaagcttttgacattttgttatagacttacatgtatattatatcccctatactggactgtaaatacattgagagcaagatcaatgtctatttcatccttttgtctcctataacactggaaacaatgctttacccatagtttatacttaaaatgccataacattcaaaattcaataaatacatgttaataagttatgtatataatctagataacagactttgtaatttcttcatgtgtacatttttcaattctgttttgtttctgtattgatttttaagtatttatttctttttcttcttgttcttttgtttgattaactctgatgatctgggatgctttgtagggagtaatctgacatgtagctttaagctgatgcttttccatactgatacccacttttctagcaagttattaaattgtgagttctttctctattctgatgttgcttcgactttattaagttaatgtgatgatttggatttatttttaaatcttttgtttcactgacacagttctgagtacttaacacgatatcattgtttacaatgtacattaaaacttgatggctcatgtatttgcattagtttttcctttaaaaaatattccttggggctgggcatggtggctcatgcctgtaatcccagcattttgggaggccaaggcaggcagatcacttgaggtcagaagtttgagaccagcctggccaacatggtgaaacctagtctctactaaaaatacaaaaatatgtgggcatggtggtgggcacctgttctcctagctactcgggaggctgaggcaggagaatttcttgaacctgggaggcggaggttgcaatgagccaagatcatgtcattgcactccagcctgggcaacagtgagactccgtctcaaaaatatatatactatatattttttttgtcaaattttattttattattattattaatttatgtttttgggactgcatgccatagtttaactggtacagttttttttgcctttttagtgtaatgtttaataaagcatagcatgcatacagaaaaataaacataagccttaatgaattttcacaaagtgaatacaaccatatgaccatcgaccagatgaagaaccaaaacattatccgtacccaagaaccattttatgtttcctttcagtcagcctccctaagggtaatcattatcctgacttttagcatcatagattaattttgcctgtgtttggactttatatgggaagtctaatttatactttaaataaaaatataccatatatatacttttgcttcttttgctttacattgtgttttggagattcttccatattattgcatatattgtactttgtacatttttaattgctgtatagtattccattgtaagaatctaccacagtttatctgctcattttactgtgggtctgaattttagtagtttctatgcttttgctatcatagtgcagctatgaacatttttgtgcatgtcttttagtaaagataaatacacctttctattgggtatatattttggagtggaattgccatgctatagggtatgtgtaggtttatgtagctttaacagatgctaaacatatttttagcaaatttcgctcccctggcagtgttatgagagcatgtcttttttcattgtctccattgtatgtgtgtagtattatcacattgtagctttggtttgtatttccctaatggctaaggaacttgtgcatcttttcagctttttctggccactgaatattctcttttgtgaagtgcctgttcaggtctttaattggcagtgtttttctttcttagtgtataaaaatagtagtacattttataaatgatgaaatacaaacaagagtacattttaagcacttgccattaaaaaaactggtatgtaaggtaatacatgtgttaattagcttgatgtagccattccacaatttatatatattttaaggcatcatgttgtataccataaacatatacaatttttgtcaattttattttaaattttttttagagatggggtctcacaatattgcccatgctaatcttgaattattgggctcaagtgatcctccctccttggcctcccaaagtgctaggattacaggtgtgagccactgcacccagccaatttttgtcaattttaaaaagaagtacaaaattaataccctgaatgatgttgctaccactgtaaatgatactttcatactttctagttatctgtcacaagtatataggcaaatcatttttgtgagtttatctatctacctattcttttattcagcaaacacttattgaacatgtattatgggccgggcacttgttagcgacctaaagcaataatagtatgtgctaggtactaatttaggcaccaagaatacaaagataaaaacagaaatgctcctttccctgatatgctcaaaacctaataaagacaggtaaacagaaaaatgacaatatcatgctatatggtaagtgctatatggtaagtgagttgtggtcaggaggtgatggaagaaatcttttctaggcatgcaatttatatctactcttggactagtccagcctgcctcttactttgcaggaggcttactcaactggcatttgactgcatataattttaaactagctttatctagtacatcggtttaggtcccaacaggaaacagatggcatacttaaattaagataattataggagaatttatttacaaagagaccattacaaagatatgtatgaggtatggtgacaccataagaaaggataatgcaagaagcaaaagtcttgaagcagtgaacagttactattcgtaggcctgaaggaataagatgtaagagcacctggcaggagagtcagataaaaagacctcctcaacacactgacctgtcttttcatacactctgatcatctgtggaggtcccagtagcagaacccaacctgataagccagaggacatgggagtacattgatgtagtttacatgagttaaattcccagggcacagagtggagtggagagtggtgctggaggagcacaccaaagatatctggcacacatgggaaggccaggattgaaattaaattcattccttgatatactttgcaaatgatgttccaaagataatgatgtcctcaggtatgctggcccttttactcactactttctctattaagcatggaaaaatgaggaaggatcacttgagcccaggagtttgagaccagcctggggaacatagcaagacctcatctctacaaaaatttaaaaaagaaaattagctgggcgtggtggtgcacacctgtagtcctagctactcggaaggctgaggcaggagggtcacttgagcctgggagttcaaggttgcagtgagccatgatcatgccataccactgcactctagcctgggcaacaaagtgagaccttgtctcttaaagagaagaaaagcaaagcaaagcaaagcagagttcttgagatcctaaagaatcatcttgagttgatccagtcagatggtgataagcattgtttcctcctttctcagcttacctgtatctcatagtacacactctgctcagctaacacagggttgggcttcctgcagaagggacaggaggggatgggggcaggaatgaaaaggaagactaggaactgggagtgtgttagatgggaggggcagccatggaactccatgggccaaagccccagggcattaggagttaatggctggtcctaaccctggctaagctgccctgcctcagcatgactgccagactgggaccttcttgctgggatcaccttctctggagctcccaagattttggaaattagagcttttggctcagatggctgcagcatgctgagcatacttaggagtggaaaagacaggcaaccctggaatctagggaagatgtggcatagaatgatggttaagagctcagatgctgaagccagagtgtatattctgtgttcgctccttacagcctgtatgactttgggaaagttatttaacttctctgtttttcagtttccatactgtaaaatgggaatgctaatagtaacagctccaggggtcttaagaggagtcaatgagttagtatttgctaagttcttagaaagagctcagcatagagaaagcactatatacatgtttgttaaatcaaacttgaatatccctacttgctgggcctcttctctcaggcctgcacatccagagcaattcttgaggttggtagcattttccttcctgtctgtcaatgcacatttggctgactgttcaaggccataggtttgtttggtttttagggagggatggccaaattgcctctaagaagaacaggccctcttgtgaatatggaagcttagcaatcctctgtcctttcagaatgggaaaggaaagtagtagacccctgacatgagcagtacccacttctatggtaggagactaccaaggatattgctagttcgggctgagtagggtattctgacctgctgcccaccagcaaggtttgatttgccctttttggcattgcaggacactacctaacttcctcctggctgaagaatattcttcattgactaagagctaattctgccttgtgttaggtaatctgaattctgagagttgaattaatagaaatgggatggagtaattcttgtatcttaacttttgggttcttattaggaggagtcggtggcctttcagcaaagcaagaagtttctgcaaaacacacgccagattgttcaagaagatcctgttgggcctgttgtgtttgggtgagatattgagaattcatgaaagtgagaaacacagttattttagaaatttgccttgtgtcaaggtgattaccaggtggaaggcatttttattcaaaactgatctaaaaagctatttgatgtatcaatcttaactacttgtaggtgcaccataatgtattgaattgcacttgtaggaacaagtgaaatctgagaataaactatttttcaaaagtgtactatttgatggatttaaaatatttcagagaatgggggcttatcctttttttagtggcttgatttggtggagtgcatgattcttacagccttgatgacagaagcctgtattataccttacttatttgctggtttactactatatcattggatataaaatattcttaaaagacagcagatctctgtttaaaacatactgtcagtggtatatggggctttaatgtcaaaataggaggcacctgggatggtgggagcaaaaattatattttgggatgagtaagagagccatgggatgaggtccacatggctgcacttcccagtggtagctttgtttacatggtttgttccagaggcaaggttaaagtgactggggtaataaagtttcaaggggagatgactgacttttgaagagtctaatggtgaacactgatcaaatctactccaagggacagagagaggatattagataaaatagaagggaatgagatttcattagggaccagtgaaaatatgcagtctttgcattaagtcagactgtccttgggaatcctcaagaagaggacagttagacatctatcctggcctcaagaagtgcagttctgtctgacagtagggctgggtggcaaggtctctggagggtttttcttgctctaagtcccaggcattcatgactggagtttcatttgcccattggaagcactgccttgctgatctttactctgcttcttctctttttagcctatgctgcctatctcctggcagcttgcatcttgaatttccagagggcactggccttgtttgtcatcacctgcttggtgatctttgtcctggttcactcgtttttgaaaaagctcctgggcaaaaaattaacaagatgtctgaagccctttgaaaactcccgcctgaggctttggacgaaatggtaagataagaatctcaatacctggcctcacagcttatcccagcccacctccttttttctcttttgatagttgctgagcaggctctcagacctgcacataggcttttcagaaccaaagcgcagagaaaaataacaataggcctctgagcacaggacctcagtccagattcttgtagccttgggtctcaacattgctggggggcaggaggagtttagtttcagagaagagttttagtctgattgtcatcagagccagtgtcagaaatgagaaaaatcatactcctcttcagtgaagtaatcagaacagagccttgcagctacattaagctatcaaattgatttggtggtcattggtgtctcccttagttccctgatactttttatgctttttttctctctagtctcctagacttcctgcacccactggtgccttttaaaattccttagagtttaaagagaaaacttacagtcgtgtatattctgaactggcgtctacagcagccacagctctaacaatggcacatgcatggcctttgatcacaggccaggagtgagagaataactttcagactctctgtaagttatttgtttttcattcactgggttgatgacatggtcttggcattccttcttcagggtgtttgcaggagtctccttggttggccttatactgtggttggctttagacacagcccaaaggccagagcagctgatcccctttgcaggaatctgcatgttcatccttatcctctttgcctgctccaaacaccacagcgcagtgagttttgggtatttgggttgggtatagcaacacatggccaagggccaagtgctaatcataaagcgtatgcatcaagtgttaattacaagggcatagaactagttcataacaacccctagaatttgcctctttgataattttgtttctaagataagtttaaaaaattctcaaaggccctagaccacttattttcaaactgtagattgtgatccattaatgaatcttgataccaattttgcgaatctaggccagtgttaaagaaagaacaaaagaaaaaaaataaggaaggagagaaaaatagaatacagtagaaaatcaacacgcagtgcagatagtactgttaaaatattgatttataaaacttttatttgtatgtatgcatgcatatatgtgtgtataagtgtcatctaacctctagacacattttttaaaaaccttatgaacatatgtggctttttgtatattactgccctgtttctccctaccattgcccctgctccctatgccatcagaccctagacttactgttaatattctaggttggttccacccagagtacatgtttaaaactccaaccaggtaatggactagcagaactcacattggaataatattcttattgatcctaggtgtcctggaggacagtgttttcgggcctaggtcttcaatttgtctttgggatcttggtcatcagaactgatcttggatatactgtatttcagtggctgggagagcaggtccaggtatgagaaattaaatgcgagggcttttctcttttagaaccctagagaaaggagatttgagaggagcatgagaagattaggctgtatcttgttaatgatgtggtggaagatctggttgggaaaggagagagtgtactaggatacagctaagaatatgaataaagagctcatggggacatagcctgcccctgggctgtcaaagggaggccaacctcagtagcaacagtaggtcctcaggacgcatggggctggtctcgtcttcctgtgtgtccttttgggtttcattcttattctctgtctttttctttttttcccttcagattttcctgaactacactgtggccggctccagttttgtctttggggatacactggtcaaggatgtctttgcttttcaggtgatacctattttatgggcaggaatgatggtctatggaggggtagaggaataaagcagaggatgaaagtgtgtgtccaagagatcagcgcacctgtataccagtttgaccctaacaagagggtttaaccccatcagtaaaggaaatggcatctatcttcttccctgtggtcattgccatcataaaattagatgaaatgagaattgggggaaaagggtcagaaaacagcttgtggtttagtactggtgggacaatgggtttaatacattttaaatgtatccctaaactagtttgtgtaggtactgaatacctacactgtatgagatacccttggaatgctaagagcttaacttagaagcctaaaacacagagtatgcaatgtaacatctcaccacctgctaccattctcattacaggccttaccaatcatcattttctttggatgtgtggtgtccattctctactacctgggccttgtgcaatgggtagttcagaaggtgagtcgttctcttacaccagtcaggagacaggccttcatcctgtcatcagtcagctttggaaaaatgcccatagctaaggtctagagtgttagaaacaatgggaaaaggcaggccctctcaagcatgcctgatagcaaactgtcagccgaggccctaggtaggctgagggcagagcagagagaagatgagctggactgcctttgatactgagttttaatatacttgttctaaaggcaacgagtcctgagttctggtcaaggctctgtttctaagttggtttttggccctaggcttgctgctctacttctctaggcctcagtttccttatcagtaaagtggaggaggaggagttttgcgagatgttctccaagattcctgctaacattaatggtttaggtttctgtattcttctaggtcgcctggtttttacaaatcactatgggcaccactgctacagagaccctggctgtggcaggaaacatctttgtgggtatggtaagcaccttgaggacttttggtcttcttccctctgaggaactgagaatttggcacaaaacaagagtatgctttccttctgaaaagtcaaataaatgaagactgtggggcagccaatcttggatgagagataactcagcagctcaaagaagactctgctcattgcgttcaccctttgcgcctaataatacttccctggtaatacttaatctggagggatagccttcaccacttctaatgaacacttcctacgtaggaatgtagggaatgtcctcgtccaattcatatcccctttcggaggctatgaagggtgtttgatcctcattctggtttctccctgtgactccctgcagtacttggtttccagggtctctaaggaggaaatcacttatcttgctcatcgctaacgcccaggctcttccccataatacttgcttggtacattcgtctgtatggagtaggtgctccatatgtgctactgactgatcagctcaatgttggggacaatgacttgtcacattcgcagggagttagtactgaggtctttctctcccaaggctctaggctgcttctgaaatgttctcagagtacttctggatactttaccatagcactccacattttgctgaaattatccataatcagcctagtttcctatgtgagactataagcttctaagagtaaggactttgccttacctatatcaatgtccttagcatctagtgcagtgctaggcacatagttggtacttgttaaataatagataccattatcttaggtcagtgctggatatggcttacatagatggcccttcataatttcataacattttcacaaacattatttcttttgatccataagcagggggtttggatcatctatttgtatttcatttaatgagtactgttgaagcatctaatatgttctcattaagtgcactgcattccgtaagttcagtaagtgtgtggctttagacattgagaatatacaaacaaaatataccatttctcttctataacattttaacatgtcaatagatgaaacaagcatgtatagaaacaggtgagaactatgccagccaggacatgattgggtgccagaggaagtaaggcagaagctggatgggcctgacagccgggctccgtgctcactaagtgaagctgtggctcacttaacagtgctcacactggatggatgtgtatctagtgggtccagcccctggggctggggtgggcacactggcatggggagttacaccttcttggaatctgactgttttctccgtgtttgtagacagaggcacctctgctcatccgtccctaccttggggacatgacactctctgaaatccatgcggtgatgactggagggtttgccaccatttctggcactgtgctgggagccttcatagcctttggggtaggcatagtctgcttgatcactcctgggtgaactcgagttgggtttgatagaaacactgatgcctaagtctggcgcctcacaggttgatgcatcatccctgatttctgcctctgtgatggccgccccttgtgctctcgcctcatcaaagctagcgtatccggaagtggaggagtccaagttcaagagtgaggagggggtaaagctgccccgtgggtgagtccaaggaggcatatactttgggagatggtgagctgtagttaagagtggcactgtggtggcagagacttcaagtctccctgagggggaataatgtgattccatattccttcttgcctatctctggtgcttgctaatcatgctggttttcttcatttaaccctcccacctggcactagcttctgcatgccagtaccctctgtccttgccatccatgcaattacatgacaattatatctgatattgcttcagagtaatttccactaatagggtcactgaggaacccctgtcaccttctacattggccttgcaccctcctcctgcacgatagggacagtgggatttctcttctctgaggggctgagactgctgtagacaccctactcttgccctctgcccaataaccacaggaaggagaggaatgtcctggaagctgccagcaacggagccgtagatgccataggccttgctactaatgtagcagccaacctgattgcctttttggctgtgttggccttcatcaatgctgccctctcctggctgggggaattggtggacatacaggggctcactttccaggtaaaggattacatttgttgggctgtccctctgggatgtggttaggtagcccttcaaacatgcatgtccaaatcaaaaccacaatgagataccatctcacaccagttagaatggcaatcattaaaaagtcaggaaacaacaggtgctggagaggatgtggagaaataggaacacttttacactgttggtaggactgtaaactagttcaactattgtggaagtcagtgtggtgactcctcagggatctagaactagaaataccatttgacccagccatcccattactgggtatatacccaaaggactataaatcatgctgctataaagacacatgcacacgtatgtttattgcggcactattcacattagcaaagacttggaaccaatccaaatgtccaacaatgatagactggattaagaaaatgtggcatatatacaccatggaatactatgcagccataaaaaatgatgagttcacgtcctttgtagggacatggatgaaattggaaatcatcattctcagtaaactattgcaaggacaaaaaaccaaacaccacatgttctcactcataggtgggaattgaacaatgggaacacatggacacaggaaagggaacatcacactctggggactgttgtggggtggggggaggggggagggatggcattaggagatatacctaatgctaaatgacgagttgatgggtgcagcacaccagcatgccacatgtatacatatgtaactaacctgcacattgtgcacatgtaccctaagacttaaagtataataataataaaaaaaaaacaaccatgcatgtccttctgacccacagtaagccaagagagagcatgaatagaagggtggaagagattgggccaaggctccagagaaggtccttggcacctgacctttgttatattagtccttccttttcctgtgatatctctctttcactcaggtcatctgctcctatctcctaaggcccatggttttcatgatgggtgtagagtggacagactgtccaatggtggctgagatggtgggaatcaagttcttcataaatgagtttgtggcttatcagcaactgtctcaatacaagaacaaacgtctctctggaatggaggagtggattgagggagagaaacagtggatttctgtaagtgacaatccaaaaagcataaacaccgtgaggtctcagccatggttatctgagggtagacagaaagtgccaaacaggtttgttgcagacctgcagatgcctttctggggtcgcaggcctaactacaaagcaagcagaacagcctacctagcagcctcatctgcagcgcctgagctattatgggtctgcatgctattttccccctgccacccccaccactgccccaactgtgacccaacttctctctgtaatgtaattgctgggtctttacagctggggcagtccagggcagacactatcttttgatggtctaaggtccccttcttcacttataagtttaaattgctccaaattaatattctttttctttccctttgcctctctcctcctccttcgcaatccttctcattcccaggccttctcgttattcatagccttcaacaggaacagcgttgggcaatgaggcccatggtggtttccatgtcattatccctatagtaactcagggaacagttgttttctgagcatcctttcatgttccttgggaaaccatggaaaagactgggggctgtcagtactctggaacttctattgtgattataagaccgcacgcatgggactgaatttatttgcttatttatttttgttttccctaggtgagagctgaaatcattacaacattttcactctgtggatttgccaatcttagttccataggaatcacacttggaggcttgagtgagttcatccattttcccagctccccagtaagacagccagatcccagcttctgtagtgggcagtcctggtgcttcagtacaagctgggatcagatagagaagccattgtgaaatgggcccatttcttaggctgcagttaacttggacctaaggcagtcatgcccacctggctaatgcatacagccctttataatctcaacttcagttacttctttttcctttggattggaggccccaaaaactaattttattttaattttctctatgaggaagaaaatataatgatattatttcaattttgccattaaattggaatagtgcatatataaataaagatatttatttatttatttatttaattttttttgaaacagagtctcactctgttgcgcaggctggagtgcagtggtgtgatctcagctcacttaaacctccacctcctgggtttaagtgattctcatgcctcagcctcccgagctgggattacaagtgtgtgccactatgcccattattattattattattttttttgtatttttagaagagacggggtttcaccatgttggccaagctggtcttgaattcctggcctcaagtgatctgctgccttggcctcccaaaatgttgggataacaggcgtgagccaccacacctggtcttgtattttattcagtagtgaagacactttttgaaattaggctgctcactagtcatcctcatggaaacacaaagaattaaaacaaataaaagcagcaggcacataaggcagatagacagtaagagagagtggtgtaaagtgttggatttaaatatgcaagtaccaaatgttaaaggagtgggtctttgaagcagacacagatatatttagactgttggagatactgctgcatgggggtgattgttggaggaataatatgaggaaagtggaattgtccttgagtgcaggggcacaggggtgactagcagatcccaagtttggaagatccaagttagaaatggatcttaggctggatgtggtggctcatgcctgtaatcccaacactttgggccaaggcaggaagattgcttgctataggagtttgagagcagcctggggcaacatggtgagattctgtctctacgaagaatttgaaagttagctgggcatatttgcacatatgcctgtagtcctatctactcgggaggctgaggtgggaggattgcttgaactcagatcgagcctccagtaagctgtgattgcaccactgcactccggcatgggtgacatggggaggtcctgtagaaagaaaaaaagaagaaaaggaaggaaggaaggaaggaaggaaggaaggaaggaaggaaggaaggaatcttagaaggagtagattataataagaaatatagctcagtgtgtccctttttaaaggcaattatattctggggtagagtcatttaattcatgtacttggtagccaatttaattgaaaggtgaaataattccctttcagtttaccttttccccttctgtcaaacacctgactgtattgttctagtcttgatgcctgattactgtccgattatgagactgccatctagtagtgggatatgcattgtgtggctaagtcttaggccacacaatgagtgttgctttccttagccctctgtctcaaaatagtccatctaattctggtccaggcttaagagtgcgtatctcaagcagtgaacgccaggcatttgtacctgtctggagaaacccagagccttgctttatccagatacatcttgggtatgttcacagaaccattaaagtgagggtcagacactcaatacttgatctgaggaaagtctaagttagtgatccctcaggactaatgtatacacacacttcttagggcaacactggccagtctcaggtggatggtaataaggatgctcttcatcggctgtgttttgtttctctgcgttcttctaagtgggggcccatgggatatacctgattgccttggtggggaaaagctgaagttattttattttattgtctgcagcatcaatagtacctcaccggaagagtgacttgtccaaggttgtggtcagggccctcttcacaggggcctgtgtatcccttatcagtgcctgtatggcaggtaggtgcctcagctctgatggagatactgctgcatgagggtgatggttggaggaataatatgaggaaggtagaattgtccttgagtacaggggcaacaaagattacttccctagatcatgacaggctgtctttcagaatattgatttacccatgcattccacagatacatggcaaaggcacctaatcaagagtgtccacaattcgtgccaaaagaataaagagccttgagaagcacgtgtcagatcttccccttagtacctctgtctcctttatccaggaatcctctatgtccccaggggagctgaagctgactgtgtctccttcccaaacacaagtttcaccaatagaacctatgagacctacatgtgctgcagagggctctttcagaggtgagcaccaggaccccattcctttctctcacacacggccctcaggtctccacggtaatgctgttgaggttgcatagagtgtataagggctgtgagtattggtaatggcctagatcagtgttcttttctcttattgggtgcatcttcattattagcttagtatgctccagcgacagggtctacctgtgttagtgggctactgagaagtagagcagcaaaggaagaagaaaaatggtttccctgataagaaattactctactggctgggcatggtggctcacacccacaatcccacactttgggaggccaaagtgggaggatggtttgagcccaggagttcgagacaagcctgggcaacatagcgagaccctgtctctattttatattaattaaaaaaaagaaattacttattgtgattggaatacaggtaggttatacgtagacttagcaatggttataagtggctaaaatattataggcttcttcagacagaaatgaagaaaactgagagaggataaagttgaatttataaaatcatgatgagttcaggtagtgtaaaaatgaacttgtttaccaaaatctagaatatgaaaagaagaggatatgtcattaagctaaaagaactagttttggaacacacaaaaggaaagatttgaggaactagaatgtttggtgccttcaaatcaaaaggtgtgtgtgtattggtggtgatatatgcgtgagtgaagggagttgtgggaaaaaaggctgagagatcataagaagccttgtatgaaatactaaagaatttaggttttgacctgctgaattctgaacactggcatgatcaactatgctgtttcaaaatatcattttggtagccatttgaatggcaaggagaccaacaaacaccctgctgtaatagtcctagtgagagatggtaagaattgatactaagtggttgtgaggttggagatacactagatccagtagaatcaataggattgatcattggctagataggaggaagaggtggggtgaagaagaggaaggagtctcaagtgactatctcttttccggcataagcaagtgggtctaaggagtgccattcattcacagaagaggaggactagtttcaggaatgggagtaaaagggagagattatggcttaattcagtttttgttttttatatttattgatttattgtattgagatggggtctcactatgttgctcaggcttgtcttgaactcctggactcaagggatcctcccatcttggcttcccaaaatgctgggattataggcctgagccatcatgcccagccttaattcagtttttgatgtgttaacttggaggtagttgcaggaccaccctgtgaaggtactcaaaagccacctcaggtcgggcttcaagagagaaatcagagctggagatagatttaaaagttatgggctagacacagtggctcacacctataatcccagcactttgggaggccaaggcaggaggatcacttaagctcaggagttcaagaccagcctgggcaacatggcgaaaccccatctctactaaaacaaaacaaaacaaaacaaaactagccaggcatggtggtgtgtgcctgtagtcccagctacctggggaggctgaggtggcaggatcacttcagcccaggaattagagactgtagtgagccgtgatccgtatcactgcagtccagtctgggtgacagggtgcaaacaaacaaacaaacaaataaagatttggaagttattaagtggtctgttcactacatagctagatattcaggtgctggctgcttaaaaggttactgggccaagtgaatgaatgttgcccctcctgtgtttggaggttatcatcagagaaggcaactaacatatttttttaaaaattcttttgatgcactattaaagatgaggtatgagctggattcatcattgctctggcatcgttttgattcttctttttttttttttttgagacacaggctcactctgttgccccggctggggtgcagtggcacaatcttggcccaggctcaagcaatcctcttacctcagcctcctgagtagctgggaccacaggccaggcatgtgtcaccatgcctggttaatttttactttttgtagacatgggcgttcatcatgttgcctgattcttatgttcttgtggcattttggtggattttctaaagccacatactgaagatcattgaaagacaacgtttttgtccaattaatttatactaattaagtgtaagctgttttcaagaggaaggtggccttggaataccaccttacttttcagaatcaattcaatactaaatcattataagccatacatttgcctcagggatatctggaaatttccaaatggactatggttaggagttgcgcaaaggaacagacacacatggtttatggtttcttgctagtattatcttgggaatgaatgagaaaagaaacataattgggttctatttggtcatggctgatgggtcaatttacaggtttttgtttttgttttcagctgcttagtataacttattgatatgttttgttgctttgttcctgtctgaccccttatgtacctctctggtttttcactgcagtacttctctgaatggcaccaaccctccttctttttctggtccctgggaagataaggagttcagtgctatggcccttactaactgctgtggattctacaacaataccgtctgtgcctaaggctgcttgatctatttctataacagttttgatcttaaaagctttgtgattgcaaaggtgtttatgtactcagggtgcccacaactcactcaccaagatgtttaacagtaagtaacagtaaatgtaaaagattcattttgggccgggctcagtggctcacgcctgtaatcccagcactttgggaggccgaggcgggcggatcacaaggtcaggagatcgagaccatcctggctaacacagtgaaaccccgtctctactaaaaatacaaaaaattagccgggagtggtgtcgggcgactgtagtcccagctactcgcgaggctgaggcaggagaatggcgtgaatccgggaggcggagcttgcagcgagccaagatcgcgccactgcactccagcctgggtgacagagcgagactctgtctcaaaaaaaaaaaaaaaaaaagattcattttggttcgctgtatcccaataacgaaaaatagcttttgtttttccattatttggctgaaccaaaaaatggcattcctcatgggccctgcctgaacttttatttgaaaaaataagtattactgtccaacaatgatagactggattaagaaaatgtggcacatatacaccatggaatactatgcagccataaaaaatgatgaactcatgtcctttgcagggacatggatgaaattggaaatcatcattctcagtaaactatcgcaaggacaaaaaaccaaacaccacatgttctcactcatagatgggaattgaacaatgagaacacatggacacaggaaggggaacatcacactctggggactgttgtggggtgaggggaagggggagggatagcattaggagatatacctaatgctaaatgacgagttaatgggtgcagcacactagcatggcacatgtatacatatgtaactaacctgcatattgtgcacatgtaccctaaaacttaaagtataataataataataaaagaaaaaacttcataaaataaagtgaagcacccaccaaaaaataaaataaaataaataaataaaagaaaaaataagtattactatgtcaaaaaagtcttacaaatcatgcttctagttgccatcttaaaaattatgtgatgcagtgtgctataaatgtgatttagtatgtaatttgcctgggacgggggagaagctacatttattggcattgtggatgagctggatttatattactgatgttacctttgaaaggtatatgaatatttaatgataagatttttctggttgtcaaacatttgtaaatctgcaaacttcttaacaacattacacagtaaacaaaaaatacttcctgtatactaaggaagacttctaaggaatatccatttcttaaaggccattacttcgttgtagtattctgctttagtgctagccacatttgctccaagtttatggggaagcctttaaaacagtaattttcagtgggaagggggccaattttgcttttcagaggacatctgacagtgtgtctccagacattattggtgattaaagtgggaggatgctactgacatctagtgagtagaggccaatattgctactaaaattcctataaccaaaggtcagctctcccacaacgaagaattacctggtcccaaacgtcaattgtgctgagactcagaaactctgattcaaaatattttagatatttattatatttaatattatttattatattaatattatagccctaaggaagggtttcaaaaggatacaggagttcctcaaaaagttaaacacagaattaccatagagccccacaattccactcctacatacacattcaaaagaatcaaaactaagttctcaaacaagtacatgtacatgcatgttcacagtagcactattcaaaatagccaaaaattggaaacagtctaaatgtccatcaatggataaattgtgttacatacacacaatggaattttattcacccattaaaaaaagaagtactgatttatgctatgtagaggcaccccgaaaacatgctaaacgaaagaagctagacacaaaagtcttattattgcatgattccatttagatgaaatattcagaatatataaatccatagagacagaagggagatggtggttgccagggcctggggaaggagggattagagagtgactccttaacgagtttggggttttcctttggggtgatgggaatgttttttttttttttttttttttttgagacggagtctcgctctgtcgcccaggctggagtgcagtggcgggatctcggctcactgcaagctccgcctcccgggttcacgccattctcctgcctcagcctcccaagtagctgggactacaggcgcccgccactacgcccggctaattttttgtatttttagtagagacggggtttcgccgttttagccgggatggtctcgatctcctgacctcgtgatccgcccgcctcggcctcccaaagtgctgggattacaggcgtgagccaccgcgcccggccgggaatgttttggaactagatagaggtggtggttgtgcaacattgtgaatattatgtcactgaattgttcactttaaaatggctgtttatgttatgtgaatttcacctcaataaaaaaaatttttagaaggattcaggtacttgtatcttcccttagctaatctacgtccttcaatttcccagttctctcagctcagaaccacttggtcgtcttctcagtctcgattcctatcttctctcccgttttccaaacttgacagaaaaaggaagcttcaataaattgtttcttgaactacagatgaattttactctatgcctggtttatttctgagaggcagcagaatgcaatggttagtggtattggacatgacgccagattacttgaattctgattcaagctctgccagttatcactaaggtgattttggacaagttccttaacttctctgtgccttggcatcctcatctataaaataaagatagtgagacccaccttataggtaaagacagtgacactgctgtaaggggattatctgttttctgttgctcataacggaatacgtgaaactgggtaatttataaagaaaaggagtttatgtcttaggaggctgagaagtccaaggtcaagaggccacacccggtgagagcttcttgccagtggggactctgcggagtgcaggggcagtgtaaggcatcgcatggtgagggggctcagtgtgctatctcaggtctcctcttataaagccaccagtccctctccgtgataacccattaactcatgaatggattggtccattccggacggcagagccctcatgacccaatcacctcttcaagaccccattctcaatattgccacactggggaacaggtttcaacatgagtttccgaggaggcattcaaatcacagcagggaacaaaacagtgactgctcgctccaagtctaatgtaaggttagctattactattagctgttactaatagcattactatacttactataataccatagttaatagtattatagattatagtagtaataataccattactatcatttaggaacctgagttcatggctatcgatttgttgagtaatgtatgaaattcagttcacacaaggaagcatgagagaaggggactctatctccgtccagggcgggggccaactttttaattcggtttttaaattctcaggttcctacttaaagtaaacctggcctaaactctccctcttagagggcttcgctgtaaatgcgggaagcatgccaatctcaacaccagtgtctgcagaacactgtcaaatgcaggagggaacaggaaaaacaggaactcactgtgtcctcgataaacgcgacggggcgagaggcgctcccaggcgagggcggaagtgatgtgagagggtgtagaccgccctggttgggtggaagggccagtcaatcctgggaggcccaaaacggggaccaatcgctcttgggctccgccctggaggcggggaaaacacgcccaccacgcgttgtgggcggtgccacggcgcacgcgcattcctcccacagctagtctatccgggtcctgatccgggactctgagatgaagagctgttggagcagaagagtcctgagagaaaaagacggaaaatcgtggaaaggcgctgtggaaaggagtagtgtggaaaggagaccgcggggatgaggagaggagagaggcaggctgcatcaccgaatgggcagcatgtcttaaagtacactgtttgtcttaaagtacaccgtaaagcctctcttgtgcctgttgtttagagcctgccctttttgcttaatgtgtatggacatctttctaggccagtacttatagagctacctcattcattttatttatttatttgtttgtttgagacagggtctggctctgttgcctaggctggagtgcagtagcacgatctgggctcactgcagcctccacatcccaggttcaagcaatccccctgccttagcctccacagttgctgggaccacaggcatgtgctaatttttttatgttttgtagagacagggtctcgctatgaacgtttgtgtctcctgaagttcatatgttgaaattctactcccccaggaggctgaacaagagggtaaagctcttataggagggattaggttattagggtgaaaccctcatgagtggaattagtgctcttattcaaaaggcctgagagaggtcccttgtcccttctgccatgtgaggttacagtgagatgatggctgtgagatgatgatgaggaactggccctcatcaaacaccagatcttctagtgccttgatcttggacttcctatttccacaactgtgagaaatgaatttcttttgtttaaaagacgcctagtcaaaggtattttatcacagtagcctgcacagactaagacaaatagtttctccatatctctaccataaatttcttatatttcttttcagtggcacctggctccatgtcctgtgtatgtctgactcccagaggccagaggtaggctcagaagggtggggttaggggatgggttaggtccagctggtagttgatgagggtggcctgagggatccagacaggaagctccatgccatgtttctggtataaggccaaagatcagaactgatggagccaaatctgttctcaggtaatggaagtgaggtaaatccaggaacggggggaactaggtaatcaaatcatgttgtttttgtttttgtttttgagatggggactcactctgttacccaggctggagtgcagtggtgccatctcagctcactgtaacctccaccttccaggctcaagtggtcctcccacctcagcctcctgagtagctgggaccacaggtgcatgccaccatgcctggctaatttttgtatttttggtagagacggaatttcgccatgttgcccaggctggtcttgaactcctgagctcaagcgatccatctgccttggccttccaaggccaccgcgtccggccatgtcatcaaatagtttcaacacaattgccagacactcatgataaatatctgtcatcaacaggaaagcatagttcaggaaattgattcaaaattacctaaataaaatatgttaccacttatattttcattagactgattaactttgatcagtttctgtttttaaaaactcagctcttgcttccagacaagcaaatggtgtatttctttcaagccccaaatttactttgtcactgtctcaaggttcatgcctctcacattcatcagtagatttcccttgactataaaaatcctttccataaattcgaagcaggaatcaaaacataatattgaagcagtttaacaaatatagagtgggaactttttttgctgaaatcatatttccacttgtcaagagctgttgttccatgaagggaggtaaacattacgactgtgacattgagtgcctcattaagaaaaatgggaggagagagccctgttttccatggcgacaagactcagatttgaattattcattaaatgaagaatatttctttatgattaaccaaactcagaggacagtgtcacaaatttcccacagaaaagatattcttcagacacttgacagttgagggctcctgtattcatggttttggaagcaaatgtatgactctgtgaatgggcaaactgtctttgaactatgtgactataatttatagaacaaaaaccagtatcaatttatttccttggtagatttcagagacaagctaaatatttaaaagaatgttttaggatggctagagaatggaagacattatcactagtcatatgtttataaaagcaaaacactccattgcataactctttgctgcctagatggtggtcgccattcttgtggactaactgaaagccatttgctgcctggctgccccatgctactgcagaccacagctcacggcactgttgagctgcttagatttggctgactgtgtcagcgtgtgcgactgagcacagtggcacttaacaaaggcttagaaggggtggggaacatgctcctaccagccatatcgtgtaagaatcacacacaaaaaattcactcaattactattcataataatagctaacatttactgagtgcctactaactgccaggcgttggatattacttgaccaaattctcacaaaaactctatgaggtatctcacagtcataaagccacagccacagcccctggtgctaacatgcccccatacacccccatacactgagtactgactcaggaggaaagactgaagcatattggccaaaatgggctgcagaggctctttcttcctgagaagctggctggaggagtgggtactaccacccagaagtgtgagagagttcatgtctagggtagggtaaaccttgaccactgagagacaggagacaaaaagaagccagcattgttcacccttcctcccgtgagaggcagtggcttcatatgtactccgtggagatgccctggaaggccaggcaaacatctctgttcgcagtgaagctatggccatcttggtagcacatctctttgtttttacatctcccctacctcacttcttttttctcgtcatactttcttccctgcaatttcaccaatcaataaagcatccatcacaaaaatgtgcatatttttgctctaagcttttcttgagactgtaggctcaaaaatgctagtaccaggagtagtctttaaaagcagacctttaaaagtgtgattttagagactagcccacctatctaaaggcaatcagaactgtttccccagtggtaaacaggatagtataaccctgccatgcaggggcatgcatgacaattactaaggctttcacctccagttgactgggatgaggtgcagatagaagataaggaattaggatattatgtggctgctgtatttgatcagtatgggagcaataataacggcacagagtggagaatagactggctgctcttgagagcattggaagtcttggaaaaagaaaatgatagttcaaagcagcatattgccaactaagtaacaatatgaaagccagaggagttctgtggcagccataaaggagactcatctcttgcagcagtaggttagacactgttgaaaacaatgagaacacttggacacagggtggggaacatcacacaccggggcctgtagtggggttgggggaggggggagggatagcattaggagatatacctaatgtaaatgatgagttaatgggttcagcacaccaacatggcacatgtaagcatatgtaacaaacctgcacattgtgcacatgtaccctagaacttaaagtataattttaaaaaatttaaaaaaattaggttcagggctgggtgcagtggctcacacctgtaatcccagcactttgggaggtcgaggtgggtggatcacctgaggtcaggagtttaagagcaacctggccaacatggcaaaaccctgtctctactaaaaatacaaaactagctgaacatgatggtgcacacctgtaatcccagctgttggggaggctgaggcaggagaatcacctgaaccgggagacagagattgcagtgagccaagattgtgccattgcaccccagcctgggctacaggagggaaactctgactcaaaaaaaaaaacaataaataaaaagaaaagaaaagaaattaggttcaggatccagaatggcaaagctgctaaaggtattgaatgcatagcttcaacagctttcccatgtggaggtattttccagaaaagaaaaatgtgaggcgttaagacctgaataagaaatatgtgagtggcagagtgaccagtgaacccaaggcatcagcatcacctgctagacatgcagagtctcaggcctcgccccagacccactgaatcagaatatgcatgttaacaagattccctggccgggcaccgtggctcacgcctgtaatctcagcactttgggaggcagaggcaggaggattgcttgagcctacaagttcagggccagcctgggcaacatagtggaccccgtctgtacaaaaaaattaaaaaaaaaaaatagccgggtgtgatcccagctgcttgggaggctgaggcaggaggatcgcttgaagccgggaggttggggctgcagtgagccatgatcatgccactgcactccagcctgggtgacagagcaagacgctatctcaaaaataaataaataaataaataaataaataaataaataaataaataaataaaatatgtgagtggatgagcctcaaaatctggagctcctaattgtccctaaatcttcctggccagcagaagcagtcccttttctttcttatttatttatttataatgctgtcagcaaaacccttttctcttgactaaggaaaacagcctccccttgcccatccaaaataggtcattgcagaataactttcgttcttcccaagataagcctccattctctgccttttttgcctccagtctggtaatctgtgccagagctcagcacagcctgagcagggaagtacaggtcctgctccagaaggagttagcctccattccaaaggaactgtaggacctggagaatatgtaagaactgaggactaaactctaatttttttatctgcccaaattcctacctaaggggtctagggagtcatgtcctacaaaccataaattctcatcagatgggttttgtttgaccctatatatcgtgacttacttttcaatcactctggcataacattgagacaaggaagaaatatttaaccccaaaatatatttccttgctataccttgaaattgccctacaaagtctcttgtgggaaaaatacatatcctgtagagaatccccttccccctttgttttctttcctttctttccagatccaggagataatcaactaagagccagacacccttttaggtctgataagaaacattttataacctgctctctctctgaagtctgctatctgcacaataaaacttggtctctccataatcctctttcttaacctgaacattcctttccattaatcccaggtcttcagataaactcaaccaattgtcaaccagaaaatgtttaaatctacctataccctgaagcccccggtttgagttgtcccaccattctgaaccaaaccaatgtattttattttattttctttctttcttttttttttttttttgagatggagttttgctctgtcacccaggctggagtgcagtggcgtgatcacagctcactgcagcctcagcctcctgggttcaagcgattctcctgcctcagcctcccaagtagctgggattacaggtgcacgccaccaagcctggctaatttttgtatatttagtagagctggggttttgccatgttggtcaggctggtctcaaactcctgacctcaggtgttctgcccgcctcagcctcccatagtgttgggattacaggcatgagccaccatgcccagcccaatatatttcttaaatgtatttgattgatgtatcatgcccccctaaaaatatataaaaccaagctgtaccccaaccaccttgggtacgtgttcttaggacctcctgagggctgtgtcacaggccatgatcactcatatttggctcagaataaacctcttaaaatattttacagagtttgactctttgtcaacagaatcagggtaatgtaggtgggagtagatcttgaaaatgtaagactggggagagagagagagtgagtgcataaaataaggttttataagagagaattcattacatgagggcatacattcatgagtggttatccagtgttttggcaagagcacttgaggtcactataaatagtttgttgtgctgtttccttgaagcttggacacaccagaaataatcttggcattgtactggagaagggatcaaaagtcataggaaaatgagaac

SEQ ID NO: 1214 - DNA, 2458 bp, Homo sapiens
tccttcactgaggagccagagggaatcaattccacaagctgggttgaggagaacaggagatggagaaagcaagtggaagacagtccattgctctgtccacagtggagactggcacagtgaacctggggctggagctcatggaaaaagaagtagagcctgagggaagcaagaggactgacgcacaaggacacagcctgggggatggactgggcccttccacttaccagaggaggagtcggtggcctttcagcaaagcaagaagtttctgcaaaacacacgccagattgttcaagaagatcctgttgggcctgttgtgtttggcctatgctgcctatctcctggcagcttgcatcttgaatttccagagggcactggccttgtttgtcatcacctgcttggtgatctttgtcctggttcactcgtttttgaaaaagctcctgggcaaaaaattaacaagatgtctgaagccctttgaaaactcccgcctgaggctttggacgaaatgggtgtttgcaggagtctccttggttggccttatactgtggttggctttagacacagcccaaaggccagagcagctgatcccctttgcaggaatctgcatgttcatccttatcctctttgcctgctccaaacaccacagcgcagtgtcctggaggacagtgttttcgggcctaggtcttcaatttgtctttgggatcttggtcatcagaactgatcttggatatactgtatttcagtggctgggagagcaggtccagattttcctgaactacactgtggccggctccagttttgtctttggggatacactggtcaaggatgtctttgcttttcaggccttaccaatcatcattttctttggatgtgtggtgtccattctctactacctgggccttgtgcaatgggtagttcagaaggtcgcctggtttttacaaatcactatgggcaccactgctacagagaccctggctgtggcaggaaacatctttgtgggtatgacagaggcacctctgctcatccgtccctaccttggggacatgacactctctgaaatccatgcggtgatgactggagggtttgccaccatttctggcactgtgctgggagccttcatagcctttggggttgatgcatcatccctgatttctgcctctgtgatggccgccccttgtgctctcgcctcatcaaagctagcgtatccggaagtggaggagtccaagttcaagagtgaggagggggtaaagctgccccgtgggaaggagaggaatgtcctggaagctgccagcaacggagccgtagatgccataggccttgctactaatgtagcagccaacctgattgcctttttggctgtgttggccttcatcaatgctgccctctcctggctgggggaattggtggacatacaggggctcactttccaggtcatctgctcctatctcctaaggcccatggttttcatgatgggtgtagagtggacagactgtccaatggtggctgagatggtgggaatcaagttcttcataaatgagtttgtggcttatcagcaactgtctcaatacaagaacaaacgtctctctggaatggaggagtggattgagggagagaaacagtggatttctgtgagagctgaaatcattacaacattttcactctgtggatttgccaatcttagttccataggaatcacacttggaggcttgacatcaatagtacctcaccggaagagtgacttgtccaaggttgtggtcagggccctcttcacaggggcctgtgtatcccttatcagtgcctgtatggcaggaatcctctatgtccccaggggagctgaagctgactgtgtctccttcccaaacacaagtttcaccaatagaacctatgagacctacatgtgctgcagagggctctttcagagtacttctctgaatggcaccaaccctccttctttttctggtccctgggaagataaggagttcagtgctatggcccttactaactgctgtggattctacaacaataccgtctgtgcctaaggctgcttgatctatttctataacagttttgatcttaaaagctttgtgattgcaaaggtgtttatgtactcagggtgcccacaactcactcaccaagatgtttaacagtaagtaacagtaaatgtaaaagattcattttgggccgggctcagtggctcacgcctgtaatcccagcactttgggaggccgaggcgggcggatcacaaggtcaggagatcgagaccatcctggctaacacagtgaaaccccgtctctactaaaaatacaaaaaattagccgggagtggtgtcgggcgactgtagtcccagctactcgcgaggctgaggcaggagaatggcgtgaatccgggaggcggagcttgcagcgagccaagatcgcgccactgcactccagcctgggtgacagagcgagactctgtctca

SEQ ID NO: 1215 - protein, 658 aa, Homo sapiens [sequence omitted]

SEQ ID NO: 1216 - DNA, 38692 bp, Mus musculus
atgtgaagttggtcatcctaggaggcataaaagagagaggatgggaggaaaagaattagagattttatacacacacacacacatatgtatttgtgtgtaaatatataagacattggtatatatattatatacattatagacagattatatatgatatataatatatgtattttatatagggaaggtatatacaacatagagatttttatgatatatatattatatgtaatatatgcatagttatatgatatattatatgtaatatatggagagattatatatggtatatatgctaaatactatatatattatatagagagaattttttttttttttgttaatcaagacatagtctcaatatatagctctgcttggcccagaactcttttgtagattttggcttaaagagatccacctatctctgccaactgaatgctgggattaatcaccaggttcggtgagtatgggtggagttttttttttttaaataattgtgtatttgttgagcttatagtataattgcatcatctcccattatccttttctcatgccaaaacctttcgtgtatccattttctgcaaataagcaataccctacctgtccttggctcggaagtttaactgtagagataaacttaacaaatgtgttagggaggtgaagagatggctgttcttccagaagcccagagttcagttcccagcgcccacaagggggctcacagccagcggggattcctgtcccagcagatgtgatgtgatgctctctgctggccacctccagtactgcatgactatggtacacagacatacgtgtagacaaaacactcacagtcaatatttttgttaaagaatagttttaatctatagaacgccttgagaactgtggaggcagcatgcggtcttcatcctctgagcgtctctctcaacgcagatgcacctgtgtgatgaattgttagagctccagagtattttttttttaacatttcctcgttttcccccaatattatatgagtctatccaggacttattcctgtgtctccttagactcttccagaatgtttccatgaccttccttttcttcctgatagccttggtcacttaaaatttacatttatttatttatttatttatttatttatttatttattgtgtgtgtctgtgggggtacatgtattctagggtgcacaagtagaggtcagaggacagtttgtgggaatccattctctctttcatttccactgtgtgagctccagggcttaaactcaggttatcaagtttgtttgtttgtttgtttgtttgtttgttgagacagggtttctctgtgtagccctggctgtcctggaactcactctgtagaccaggctggcctcgaactcagaaatccgcctgcctctgcctcccaagtgctgggattaaaagtgtgtgctaccatgctgggttatgtcatcaagtcttgttggcaagtgtcttcatccacggagctatctctctggcctgactttgataattttggagagtgtaagttaggtgctttctaggttatttgttaactggggtccacataatgtttttcatggttaaaaatgggatataaatttttgcgaggtagaccaggggcggtgaatgcactattacaagaggtagcttgaaaactttgtgctaggtggtactggggctaaaggacaagtgttaggagaagtttgagaccccgtacaacactctagtcacactaactctacctgaggggcatccaagtgatgtggaagagcactgatctccacaaaccaaggaaggaaagggaagaagaggtaaacctgggcttcgatgggcttcctcttagagcagtgtccagcctttgctgacaccggctctgggtacaggggtgagtcttcaactttttctgttttccactttgttcttattggcctcttgaggtgtttattatattccaggaaccaaggtcaccaacggaacagagagaacacaacacttacgcaggggtgtgcagtttcaaagcagtgagatcaagccggggtagtctgtcttcacagaagatcagcgtgcctcagagtgtccattgtggtctccgatctgcagatgtattaaagggaggtgggaaaaggggaagggacttgtttggggacacaactggcaagtgacaaagtaagacctagacttgaggcaagtgtaaatcaagcttagagtccttgccaccactggaaagatgctcaagtctgccatacatatttactagtgtgtgctagggagtatctacttggtgagtgttctcagccctcaggtatgaggcctggagtctgttctctgtccttcctgctattaatgcacacagacaaaccagttagtcactgagaacgacactaagtccctttctgacatacggatgagagtgagcttattactgtatttttcttggaaaatggtttttccataagcattaagaaacttacatcttgggctagagcgatggctcagtggttaagaacactgactgctcttccagaggttccaagttcaattcccagcaaccacatggtggctcacaaccatctgcgatgggatccaagtccctcttctggtgtgtttgaagacagctatagtgtactcatgtacacaaaataaatagataaattaagaaaagagaaagaaacttacatctcagccaggcagtggtggtgcacgcctttaatcccagcacttgggaggcagaggcaggtggatctctgtgagtttgaggtcagcctggtctacagagtgagtgccaggatagccaaggctacacagagaaatcctgttttgaaataacaaaaccaaaagagaaaaacaaaacagaaaagtaagaaaaaaatctttacatttttcatttctgaacacatctactctgggaactatgggctaatgaataaatataaaacagaggagatgtttgtattttaacaatatatgaagaacagctacaagtcaatcatgtgaagataaaacagacacacagctcaagactaactaaggactatataggaagggcctatacaggaggagaaaatatcattgatcatcagaaaacacaaattcaatccacaataagatatcgcttcatgcccactggagagtttaagatgtaacactgtgaagtgtccatacgactgtggaaaacatttcctttttatgcagttatggggataaaatccagggcctcacacatgtgtggcaagcacactgagccctgcaagtgggccctgatcctcctgcctcagcctctccagagctgggattaccagtgtgtgccaccatgtctagttcctggaactcttgcacacagctaacgatacactaggctcaccattctttgcatatgttgcagagtagtacagttactttggaaaacatttggtagtttacaataaaggttaaatatgtgcccactctctggccagcaattcatttcaggtgtgtatgttcaaggacgtacatcgacttttattaaacctgaactcagaatattcgaggcaggaaaaatccatgcgtccactaatgagaattgtatgtacacactgtggaatattatgtaggattaaaagtagcagtcttgccgggcgtgggcctttaatcccagttctcgggaggcagaggcaggcggatttctgagttcgaggccagcctggtctacaaagtgagttccaggacagccagggctatacagagaaaccctgtctcaacccccccgcccctcaaaaaagtagcagtctttcaagccaggcaacacaaattagcctcagcaatgtgttaagtataagaactatggataaaaatttatatagaatgtgattctatggatctgaaattttagcagtgacaaagtgggtgtgaagtgggagaaagcaggacgtctttaggactggggtcataggactggtgatgatggaacacagcaggaaatgacgtaagggcaatggaaacactaagtttgttattgggaaaagaaacttaagtatgtatttgcttgccgaagctcatcagatggtacactatactctgtgcatttggctgaggtcaatcattcattctgacagaagcatcgaacacgacttatggtaaatgcttccgagagtccctgccttgacccaagtctttcttgggggtaacatgtggttctaactgacagatgcttgattttcggtgagacttcttttaggtcagtgattctcaaccttcctactgctgcgactccttaatatggatctcatggtgtagtgaacgcctccatgcaattatttttgttgctgtgtcataactgtaattttgctactgttataaatgtaatgtaagatataaagtaaacatctgtgtttttacaatgcatggtcttaggcgacccttgtgaaaaaattgtttggccctcaagggagtcgtgactcacaggttgagaaatgttgttttaggtcttgccgggcttccaaaaatcagctaactgtgacaagctcgtgctccttccactaaagactcaattaaatgaaatgttctcccaagtccatgagggacttctggaaaggcccaggtagatttcatcataggttgtatctggagtggcttttggtgggggtgggaaggcattcgagctcccccagtgtgggctgccccatccaactcctcccatagaagcagagcttgtctgtctctgtccaagattctggttcccatctcccctgagacccaagcacccctgtggatgctctgctttgggagagaagcgcacctgtcccagcctacaaagatcatagcccggaaaggctcgccttctggaaaaaagtcaaaagtgtaaatcaggaatggctcaatcgtgggaagcccggacaaggagtggctgacctggaagagtcctctgtgtgggaagagactttggttatcagtgaggacttagaacaaacttgactgttcctgttttaacctcttgccgcttcctccattgtctttctcactcagcttagcggaagtgttttcaccagcgtgagggcgtggtgtgtgtgtgtgcatacttggtgtgcatgtatgatgtgtgtgtgcatgtgtgatgtatgtgtgtgatatgtgtggtgtgtctgtgtgtacacacttggtgagcatgtatgatatgtgtgtgtatgcatgtgtggtatgatgtgtgcatacacgtgtgaatgatttgtgtgtgtggtgtgtgtgtgtgtgatgtctgtatgcggtgtatatgttctctccttccaatgactctggccactaacttttgacctcagtgtctgcaggaatgagcagatctggagaggaagatgaccttctatgggtgtgatctcccattcattccttcattcaacatattttctaccatttttaaagaacaatatttttattgattctttgggaatttcacatcttgcacccctatcatattcatacccaagccctcccatgctggccccccaactcttatggaacccccctcaccttccctccccccaaaaaagaagaaaagaaaggagaaataaaagaccaagtccaattagagttatccatatccttctggagcatggttaaactctcagcggcttgtcccttaaatagagctgagacctccccctcctgcacccctgccagaagccatcgattgtggagagctaacttcaacatccctatcacatttttttcttgtttgtttgtttgtttttgagacagggtttctctgtgtagatctggctgtcctggaactcactctgtagaccaggctggcctcgaactcagaaatccgcctgcctctgcctcccaagtgctgggattaaaggtgtgtgccaccacgcctggtccaatcacactttttaaagtgttctctttgatggcttcctgttcaggctgctactcttttgggggtagggtgaggctcagagttggggtgggggtaggggtagtcacagaagcttccatgtcccttttattcaactatctgtcttccatcagcaaaaggagcttccttgctcttcatggttagtgggagcatggtcacgggctggtgacagcacagaccacagacacagcccttggcttctcacatcaatatagcccttgaccatggacatccaagtggccttcggtgtcaacctagacatcaacacagaccaagggttcagacacggcccctggaggcagcccagatgtggacatcaccatgaactcaggagcagggcaggtcactcacatcagcctggtccccatggctgttgtgtctccagttccacatctctctgcacgtaccactctgtttttctctttttcttgtctttccaccacatatttattcattgtagtggtgcccactgtctgcactgtgaggcagggtggcctagctggcttccgccaccagcgccttagggcaggtggccttcttattttctacctttaagtttattgaacactgggtgtcagtcttgcttcttgtagctaaagtaaaaaaaaaaaatgagtggagtggacctttgtgttggggatagcataccaatgacagagactgcctgcagcaggccaggatggacacatctcacaagctccttgttaaaaaaaaaagaaagaaaagaaaaaggttgttcccatttctcctaaccttagccccagacaacagttgtattgattttatttgtccgtgactgcttttcagttggccttggtgtgcataattattctattatatctgactttcttacttctttcttctgctctggtgaatgctgtgaatctagatgttccttgagtaatgattcttaaacaattaaaatttgaggcatggggcacagtcctaggtgtaggctgtgtgttctcatcttggaaacaatgcaataactgcacaatggtagttccagattaatgtttgacttgcaaggaaagtttgaagaaatcatgtttagaaatattagaaaatgtaacagaaccacgtactgctagagtcgtatagagtccatcaccagaaagtgaaggaatttataggaattatgaaaaagcataagtacaagagacacaatcatgacataagggaacacaaacacaggatactttaattcagaaaggaaaaatactattgaagttataaaatgagttttgcacatttgagagtggttcttggataagcaagtatagactatacaaaatctcctactagtaaaatgaagtcacaacactgggactcttagaagagtcattgtgtgcaatgtgcagaagcagaagccagcagaacggctgagttaagggttaacttgattctttcgggccactgcctggcagctttgcccatgtcatttatcattagagcttcacaggaaaacacatatagctgacctcggagctctgaagtgtaataagtcaaaacttaaagtgtaaataatgataagtttgcaattattattattttggccacaggcctgggaatagggaaagcttgaagctttggggagcaattgtaattcttgattctttgtgggatgtggatattctttggaatttgatttggcaatgattattctaagcctttttcctacctacttttggagtatcattaaaagactggggcaagttaaaggagagagaatgaatgaagagaaaaactgtggagagagtgtggagagtgcgaggagagagaatgtgtgtgaggacagagtgtatgtggagtgtgtatgtggaagaagaaggagaagaagaggaagaggtagaggaagaggaagaagaggaagaggaagaagaagaggaggaggaagaagaagaagaacaacaacaacaacattatttggagtgagagtgtgagaaagggagcgaacgagagagcacaacccccagcccaaggagggagcaaaagtatgtgcagcttcaagctaagagagagagagagagagagagagagagagagagagagagagagagagagagaactttaagccttgaaaaattgcctgccagtttgtacctgaaaagttgtctgtgtgtgtttattgtgcaccttgaagatatgcctgcttccagctgagaactccgatcccctacacctttgtgttctcgggaactcccatcctcagccattgactaagtactgcatactggtgtgtactaggtttctgagaatatagaggtgaagaaggcttgtaaaactcctgattttaagggcatcttagtctagtacaggggaatgcacgttaatggggaatgtatagctctgagcaaaacacaagcgaaagttcgaggaagaccagagaatcacccagcacagaaaaggaaatgagaagccaagagacacaaactagatttcaagggattgggcttcaacctttttgtgtctgaatcactttctaattcttatggactcatctgaaaatctcacatagcacttgatccttcgttcctgagatttagggatctgggaggaactctggaacccatctaaagaaggttctgtcagagacaggagcgatggctcaacggttaagggtgagaactgtgtttgcagaggactaacacttggtctccagaactcacactgggtgacccacagggtgaccctcaattgcttgcaaccccaccccaggggagctggcaccctctttctgaaccccacgggcaccacactcatgtgcacacatatctcacacaggtatacacatattaaaaataaaaacatcctaaaacagaagatctggcaaagggatagagccttagaactgagaaggagcagagattgtgataatgttgctgtttcagaagaagacttcctgtcctctaagaagcaagcctggggctggaggtgggggcatagaccaacgatcataagggctcactctcattggcaggttggtggccctgattggctaagggggtacagacagaactcccaggagtgcccagggatgccattgctgggacaggcttcatctttagctaaccccacagaagtctttgtttagataggtaagttgaggctcacaatggggcaatacccaggtaagacaacagcgtccctaatgttcagatctcggggatgccagttaaaggaggatgttgggttccctaggattggaataatagatggttgtaaacaagcatgtgggtgtgggggattgaaccttggtcctctggaagagcagccagggctctgagccactgagccatctctccagtctctctgtagtagctttgttcttaaagaagggagggagtccttgcaacacttcctaatcccttagtgcagacatgattggctgtggtgaaacctattttgatatctctgtcctccccgaggcaggtcctactggcacacccttctctgctctggaggtttaaacaaacagccagctggcatgagtggttcccatggtaatttgtaatcactttatgttctatttgttacaacacgtaagatttatgtttctgaaaaatgcatgctgatctcggtataacctgcttgcttgttaacactctcctcgttttcaagtcaacagagacaaatacttttttcttttttctttttgatgagtgttaggagggtcgggacttcgaaaagacaattagagtaagcacttgaaaggacagccaataaactttaagaacaaggagactcaagataagttagttgctagcagcctaattctaattttataacacttgaggggctaggagtactaacttacacacacacacacacacacttagaataaaaggttgttaccatctatacaagaagatgtttggcattggttatgcgcccatggcactgcttagaagaagccagaagatgaccacagttactggttgcattgccaggggaagtgggttggctaacagggagattgcattttcctgagggcagttctctggctgtgttgccccaaccggaggaagtggtgaggcaagagcttagagcatcctgtggccatttgttatccttttgttattaatgatctggaagcaccagaggccagtttgggatgccaaacccctacctaaccagaagaagagaagaaaggccactgccgaggtcacttccagtacttggaggtaagggatgcaagggaaggcatgcatttcaactgtgaagagttccccacccccctctgagaatcagtgggaagtcacctgcctagtcatgccgggaaggcaactgcctggcacttctattttcaacagtttcgttcaccatccatctctctctttaacttaaacagaatttatcacttctttaaaatgtgtatgagagttttgccctcagaggtcagaagaaggcatcaggtcccctgggattgaagttacagttaatcaccgtatgagtgcagggaactgaagcagagtccttggtatgcttcacgagtaatgagtactcctaactgcggagccatctctcatcatctctatggttcggttcgccccatgccctatggttgtgatgcaggagaaacttgaagcatcaaaattgaagccataagaaaaatcaccaataaacttgtctaggaaatattgctatgcaaagtagaattacctttgttttggctcaagactgtgagaggataacttagagttaagcctgaatcgcagccctccctagcttcaaggggtctggacaatgatttttaacattcttatctctactacagagatgtggttgaaatgggtgttttgtgaattaatatataaattctgccacaatctttgcttttcattgaagttatgattttgtgccagcagtaatggtaatattgtaatgataatatcataaaacatttacttattgtaaaacaatattattcacagtcctattttcagctttacactacaaattgccccatgtaatgttatcaattcattcttttaattctccctttgcccaaagttgtgagtcgactatggcaaaaaactaattaaacactactcttaaaatgtctgcaacctgtcatctatttagcttttctttatccagtacatttaatgatcttcggatacaatcaaggcccagggcaaagatttgcaagtcttgctctttacttaaaactagaatgatgtttatctttcagggaaataatatgtttgtctaaagaattgtgggcatgagtcatttcaagtgtattttaggggaagagagaggaaaatctcaaacgtagatgatgaaagctgcagccagcgtggagcctttcttcccattgtcctgagcctccttttcttagccatgaaaactcttgttttggagttctctgacatggtcttgccctggtgatgatagccttcctccatctccctaggttctggttcttgaacaaagtgatttctttcctaccagctctcatctcctaaggatgcattcattggctttcaaatatcgaactaatgaactcaggtccagtgccttgcaggcataccaagtacattgggaatggatgtgagatttctacatagagtcaagctgagtcttaagtctttttagaagttgtctagaaagtgctttgtatacccactgatgtctgtatttctttctttcctagtggccgatctttcataagactttattggtatgaagtgaaattcgtgttgtacataacttcgttgcccatgatctggggtgggatgtggaggacagggggatgagggaagaagtgtgagcaaggtaccaggatctgtggccttccttccttagcatgtggaaggagagggtagagggatgcttcggtcacttttcctgttgtgataaaacatcctacaaaaacatctaaagagacaaaaggtttcttgtggctcacaggtaagggttagtccttcctgttggggaagtcgaggcagtagaataggaagcagctgatcatgttgcagccatagtcaagaaatggaagaacggctgggcggcggtggcgcacgcctttaatcccagcacttgggaggcagaggcaggcggatttctgagttcgaggccagcctggtctacaaagtgagttccaagacagccaggactacacagagaaaccctgtcttgaaaagacaaacaaacaaacaaacaaacaaaaaaaaaaaaaaaagaaagaaagaaaaagaaagagagaaatgggagaatgggtgttgttcattcattttctccgcttgtatactgtgtcacccggggaatcattccccctcgttttaagatgggtcttctgaagtcagttaacgtaattaagatagtccctgatatttatgcccagaggtcaactaatcccctgtaggcgtgcagggggcaagtccagatcttgtcaaatagtcaccacgatcacagccagagtccttgtctatttgacaacagaacacgccacttttgaaccgtaattcaccatctcttgatttcataggctcgtgaaaaatgcattcagtcaaatatacagagagattatagccatcaacaatttaaaagtcccaagtctcttaaatgtgagcacctctaaaataaagataaattacagactcccaacatttagtggcatggaataaacatcctcactccaaaatggagagatctgggtgtggcaaagagcaattggaacaaagcaagcacggaatcctgctacttcctgtctaaatggggcctcctttcaggggctctgacaccgcagcacattgcctggcccggccttctctttgaactatggagcgggccaccaagactcctcagtcttgcgtgcatagtgtcttcatagccgatgctacgtggacaattctgccaggttttgctcccagcttgaattgtggactgccgtcctcgcatcagtttctgtgtgctgtgtctagggaaccgccttcctaggcagatgcttggaggagcaagacgctactcaccttaggctattttcctttcaaacaatttggagctttgaaggttagggcctccaaacggtgaacatttgttctcgagacacatttttctcccctcattttttactagttgaggatttaaagcaaaatggatttgatcctttgcactccccccaccccagttctccccagaatcatccttacccattcacttaattttgcattctcttcttaacgcccctccccccgaaaccttaagtacattttgtgccgcccataaacgattggatgtgttattttccattggagtatggtcaacttaccaggggcctctcctttaagaataatgattctctcttttagcggctattggttgccggtagctccttccctagggagtgagactttggtcccatcttcggttaccattctgggatttatctgccttgatattgtgcaggtcttacacacgctgtcataagtactctgagtccgtacgtacagctagagaatgacagttaactagctccttacttaccccaaggcagtcaaagtccaccactgtgttagttcattagtcaactcaactagtggttgactcaaggacttctagaccttttatttaaaaaggcaaacaggtttgccttactcataggattcatgttaaacaatgtaactttttactattcctttatcttttttaaaaaaatatttatttatttatttttactatccctttatctaaaggaagtcactttacaagcgactgtttccagtaatcaaccacctgtgtctcgttggtggtaaataattgaataggaaaaagatataagacttatgtaaggcctgcggatacagaagcctaagttatgaggacttagggaagtgctttaggatctaggaaggtattttaaggttggtgaaggcaagtgaaaacctaaatggtggtcagaagtcgaattaacctatataaaagaagtgacaacttaaggagaaaactagtcatgcaattgggagcattacagacgtcctcttgagttgctcttctaagttggcaggtgtttcctgttggtaaatatcctccagagagttctatttaaaattgagctattaataaaagtgggtgcccctgtcaaaaaaaaaaaaaaaaagaagtgataaacgcatctggtttcttcccctcactgtgctattgttctcttggattgagacttctaagttcagagtcctaacactgaccgatggagcgttgataaattattgatttaattctggtaaagcctttcactatttgatccactatcatggtctcgagttcaatattttaaatttcctttggttgtcttttttctttaaacaatttttttattagatattttcatcatttacatttcaaatgctatcccaaaagttccctatactccccacccccaccctgctccccaacccacccactcccacttcctggccctgggattcccctggactggggcatataatttttgcaagaccaagggcctctcctcccaatgatggctgactaggccaccttctgctacatatgcagctagagacatgaactctgggggtactggttagttcatattgttattcctcctatagggttacagaccccttcagctccttgggtactttctctagctcctctattgggggtcctgtgttccatccagatgactgtgagcatccatttcagtatttgccaggcactggcatagcctcacaagggacagctatatcagggtcatgtcagcaaaattttgctggcatatgcaatagtgtctgtgtttggtggctgattatgggatggatccccgggtggggtagtctctggatggtccttccttccatctcagctctgaactttgtctctgtaactccttccatgggtattttgttccccattctaaggaggaacgaagactcacatgatatgcactcactgataagtggatattagcctagaagcttagaatacccgagatacaatttgcaaaacacatgaaactcaagtagaaggaagaccaaagtgtggttgtcttttaagtacagacttaaaagtgtttcttcctgtgctaaatctatatatacccagtatacccagtgttctggaaagagggaagaagcccctttttcatgatctgtagtcacactgacaagccagatcaagcaagctttttgccctcctgccccgtagaaggttccggttgggcctgagctcacctcagagagcgttcatgcttttcactcaagaccgttaacccagaaaagatgtgtgtctactgcctttttttacaatgtggatttcagtatagattacaaacagtggtgctgctaacacgtctaaaatgtatctttttgtaaacttcgaaagcttacttgtaagcttcagagaatccacttgagcccacttctcaagggtcaaatggactccagagaagcacccctgtcaatcaacagtccacgtttcccacttcatgccattccagagggagaattccttcccctgtccctggttctgggactcaagtttcaaatgtgcccttatttatttatttattttttctccttaacctgcttaactttatcctctgctgcaaatgtagacctgttccaacatcctgccaagtccaggtgcttactcaaattctgcatccaggacagctacaaagcagacatacactctggtccaccctcacagacggtttcaaccggaagcactgaagtagccagctctcgggagacttggccagcatcctagttttcttagggtccccaaagacatcacccccagtcagcaggaagtagtctaaagaacacagtgacctcactcctgcctgccatcaccccttccaagtttctcattcttaattaaatttttaattaaacagaaagggaggaatgttagcttacagaagattttggctcctccccagggccctagcaacggcttatgtcatcttctaccactgctgccgaagccaggtgtggactgcctataaaaggacttcccgccatcccagttctctctctctctctctctctctctctctctctctctctctctctctctctctctgtgtgtgtgtgtgtatgtgtgtgtcaattccccaccctttctctcctgccccttctctctctgccctcttggttcacttactacctctatcctttcccaggtcctcatgcctctcccttcatccaataaactcccctttataccagatctgttgtttggtgtaatttctcaggggtacaccttagcatgggccggccaggtgcccccttgctccgtcatatttcataacaatgaggaatcagttcaacatggagaaaggaatttttactcccctgatagacttattcatacgggctagcttccatagtgccagaaggtgctgtgcccaagttcagactgggagctacgcaacaactggcctagcaagccatgcccacaggtttactaatagtggcacgcggatgtcatgggagtaccaagactttttcattggatttaaagcatcttccatatggggtaaataaagtggctctcataggctcataatcttaaatatttgatacagaattggtggagctgttgggaagatattgtggtgcttttgggggtgtggtgggagtgggggtgtccccatttgtggcttgtgcctgttgttctgccccagctccagctcccagctttattgctcaaacgtcacatttcttatacaaaaagctattagcataatgggagataaaccccaccccccatggcaatgtgcctttctttggggaaggtgaggaagtgacaaacatttacatatcctgctagcctggcaccacaggcacagcaattaacaattgagaatggaaggacacccctccatagccagtcaatagtgtctgtgtaggttacaccagccaaaggattaggaggtatatatggccttgttggagaagctgggtcattgaggatggcggtttgaggtttcaaaaccccacactatccccagtgagccttctgtctctctttgactcctgcgttcagatcagatggaagctctcagctgttgctccggtgccacacctgcctgcctgcctgatgttccaggccacacctgcctacctgcttgcctgccaccatgctccctgacacagtgattacggactctaactttctggaaccatgagccccagtaaatggtttccttttttaatgctttggtcatgttatcttatcatgtcaatagaaaagtgactaagacatctcataatttgataccaatatttgacaaagttcttggggccaagaacacatgactagataggataaaggtcctaggaccctttccttattggtttactacagcccagggtgtttctctccagtggcgtttatgtctgggacaattacatttggcttcgcagcacaagtctgacagctctgctctcctggcactggagaggccgagagatggttaccttctcctagtttaatgtaaaaaataaatctatttttcctcccctgcccctgctcccaaaatgatgactctgaagttaattatttattaataaatgcctaagccacaagctttggcttattccccgactagctcataacttatgcaatcattcaaactattttatatcttctacatggttagttacctctcctcagcatcatgtgtccatgtctggggtgaatctcctctccattctatctcgagttcagctacttggctggtttacatcggtctccctagcattcctgactaagattatggagttaggcagtgataaggaaaagctctagagggctggagagatggctcagaggttaagagcactggctacccttccagaggtcctgagttcaattcccagcacccacatggtggcttgcaatcatctatagtgaaatcttgggacctcttgtggcatgcagatgtacatgcagatactcatacgttaaataaaaaacttttaaaaaagaaaaagaaaaagaaaagctctggactctacaaatagacagttgtaatggttacctggaccgagtaatgttttttgagatgcaataatttgagttggcagatatctttttgtgagtgtgagtgtgtgtctgtgtgagtgtgtgtctgtgtacctgtgtatgagagtgtgagtgtgtacgtatgtgtgtgtgcacgtgtatgaatgtgtatgtatgagtgtatgtatgtgagagtgtgaatgtgtgtctgtgtatgtgtgtatgagagtgtgagtgtttgtatgtgcacatgtgtgtgtgtgtgtgtatgagtgagtgtatgtatgtgagagagtgtgtaagagtgttagtgtgtgtctgtgcacatatgtgtataagagtgtgagtgttcctgtatgcacatgtgtgtgcatgtgtgtgtgtttgaatttgtgtgtattagtatatgtgtgtgcgagtgtgtgtgtctatgcacgagtgtgtaggagagtgtgagtatttgtgtgtgcacatgtgtgtgcatgtctgtacacatgtgtgtgagagtgttagtgtttgtgtgtgcacatatgtgtgtgtctatgcacatgtgtgtatgagagcatgtgtgtgcacatgtgtggtgtgagtgtatgtctgtacacatgtgtttatgacagtgtgagtgtttgtgtgtgcacatgtatgtgtgtgagtgtatgtgtgagtatgagtgtatgtctgtgagagtgtgagtgtgtgtgcatgtgtgtgagtgtgaatgcttaggttacaggatatactcaacgatgcatttttgagtaattgaatggagaaatgtttcaagatagatggaagagatggagttagaatttgagttctgacttagttaaggagaggtgtggccaaacagaaggtagcttgggttactccggagttactgggttcagagaaacctaagctcacaaaggcaatttacttactatgtaattttaggtgggtattcccagtggagtgagtcattctaaacctcttctgaagtacatttgtagtgtaagcagtttacgatttttaatcatgagagccaattctaattaggctgtagatggcagacagtaagtcccattctattttctatgtacgtggatgactaatcaaatacagtctttctcacgagttctccaaagaagttccggaagccattgccaatcagttgtttggtgtcagagaattcagagtgtctaagactgtacactatcagaggtctttctgagaagcagccgcataaacaactcaagacaatgagttgtacctgagtctcttgggaggctggggatgagtagttctcgagtcagcagggatgcagttagagggcttctggtcctcactcccagggagagacaggagaaccaggaagtatggccaactcatgtcccctccccctccactcacacccacgccacccactccccacaggaatggaaggaagaggatggagatgcctcctcctcacttcctgtgtgaaattggctcacagactgtgctttcttccttctgcaaccatatataatgtatgcattcttactgtgtggaatgccgcttgattagccgcctgattggggaagatgccaaaatattttcacatggaaatatcactggttgagaattttattcttaatcacaggaggaagaataacaccaaacataaaagccaccatcaggggcaggtcttcatcattatctccttctcctccttctcctcctctcctcctccttttcctccttctcctcttttcctcctcctcctccttctctttcttctccttcttcctcttcttccccttccttctcctttttctcctcctcctccttctctttcttctccttcttcctcttcttccccttccttctcctttttctcctcctcttcctcctcctccttctcctcctctttctcctcctccttctcctcctcttctcccccttctcctccttctcctcttcctcttcctcctcctcttcctcctcctcctcctcctcctcctcctccttcttcttcttcttcttcttcttcttcttcttcttcttcttcttctcctttttctcctcctcttcctcctcctccttctcctcctctttctcctcctccttctcctcctcttctcccccttctcctccttctcctcttcctcttcctcctcctcttcctcctcctcctcctcctcctcctcctcctcctcctcctcctcctcctccttcttcttcttcttcttcttcttcttcttcttcttcttcttcttcttcctctcttccttcctgcccccttcctccttttcccccctcttcctcatctttctctcctcctcctcctcctcctccttctttttcattttaatacctttccaggtcattcctacctctcctgtgagatactttacacatgatcaaatggttctcttagatgaggtatgagccacagacagattctgaaacatgggcaaatgcacaaacctcaaaggcattccagcaacaggagcttgacaatattctaaaggcatagccatgcccctggacatgtgaatgggggatgactgaagaaacaggtacaggtgactagggaggactgcagagacttatgccaggagtctcagcactggggagactgagacaggaggataaactatgtatgttaaaaagaatgagtggagtatggtcacccatgcctttgatcccagaatttgggaagaagaatcagggaaatctctatgagtttaatctacaatagtgagttctagatgagccgaggctgcatagtgagactctgtctcaaaaatataaagcagaaaaaagaaacaaagaaacaataaacaaggaggctgaattttcaaggcataagtattcctaacaattggtcaaacgattgttagtcttaattcattaaaaagaattagtagagagatacatattattaaaaattgccaagttgatattaagaattgtggaaacagggttggagagatggctcagtggttaagagcactgactgctcttccagaggtcctgagttcaattcccagcaaccacatggtggctcacaaccatctgtaatggaacccaatggcctattctggtgtatctgaagacagctacagtatactcatatataaataaaataaataaactttaaaaaaagaattgtgtaaacaaatgaaaagaaatcttgactagattaagttgaaagcacaattagtgaattggaagctaatactgagaaactcactggggtccataacacctagagatgaagaagaaaaccttacaaggacagacaggacaaggacaacagaaatagaagagctaatacgtagccactggagctttcagaaagagaacaaagaaaacagctgagaagcaatttccaagagataagggaagatgcacacctccaggttagaagtgcgcattcatactcaaagatgatgaaataccgaaacctgactcagcacaatttcggaccgtggctgcttagctcatgctttacttgaattaaactgaccaggttccaacttaacaagcaattcaagcttcgccaagagctgctccggattgctcccagcgtttcctaggtcctactcatccctgggaaggcagctcctgaaaagatgcactcttgcctgccgctctcaacaaaggtgcattgctgcactcggagatgtgaccagagaaggcggtgtgtaggcaagggagaggcttccaagagcagaactggactttccagattgccatgaccaggaagtgcctcctctgtcaccagggagggagtgctcacatccttgacttaccaggataaaatgtgttcccggggctggggatccctatgcggattgcttgtcacacttccatttgggacatcagagttttcattgcagtttttctgttgacattttttttttacatttcgcactgggcatactggaagtggttcaacttctaggtgtaacctcatctataaagataaggtcctttatttgaatttaacagagagaaccactcatatccagttcctcaaatttttatatttcctttcagcgtctgagctcaactaggactgccagtgtctttgggggcagagcctgctctgaaatttgcttcggatcagggattgactcttcagtgtgacatttactccactccattgctggcttctgtgctggcaccttgggtggtcgtcccttcaaagagttccttgtggcgggggcgtggcttcgtctatctcctacccagggtttccgcaaccacctcagcacttcaaaccacaggcctttctcattgtcaccttttgttctaaaaccacagagatgcacaaaagaacacgctccctccctcattcatattcattgacaaataacatcctgggatccaggcaaaaatgtgtcaaaatgctagtgatttgggaagttgcttcaccaggtcaagcttctagtttgtcccagagattaatcgttcagttttgatttcccctgttttctttcgctggtactcacgtgatttatctttgattgacacgtcagtgtcagtcttgatctgtggtggttgaggcgtgagaattttcacataaatgaaatgcttttctttatccataagtcctttcactggcttcttaatttgcaacagcaacacctggtgtaaaacgaacaggtgacactgtcaaaaaaaggtgtcagtcgaagtattgcgttttctatttagctctatttacttactgaaacaacgtttcactctgtagctctaacctgaaacttactatgcagcttgtgactggtcagtttgtggtaatcctcctgcctcagcctcccacgtgttgagattacagggttgagccacccggattatttattttcttggatacagagtcttgttatagaactcaggctgatccactgctcactaccacccctcctgactgagattgcagactgtgtcgccagagccggccctaccgtggatctttaaaagtacacgtagtgttgcttcccccaaaggcatgtgaacactttcagaagagaaggcctcaggatgacctcctttgaccccaggcaccactctgctgccaggttcctcttcctgccctggcattgatagaccatgaggaagaaccaattgattgacccctgacatattctttttaagccagtgttttgaatcccaatggataatgtctcatgaggagtgtgtgtgtgtgtgtgtgtatacattgctactagaaactatggagccataacggttgtgacagtcagggttctctggagagacagaaccagagcactgatagaaccagatactgtcaagcatctaatggtcagagcaagatggactactgtctcaaagcctatgcctgagtatcgagtctctccttagaaactgagagcttcccatgtgcctagtgtccacagaccctcagctataaagcaatgtctcctgctgtgggctttcagctcctcatcacatctttcccacacaggagaaagcaacgttcccatttacagctgagtaacaggagccacaaggtatgtctgactcaaaagttcaggctctcgatgactgtgcggtgctgcccagtgtgtcttcttcaatgtaacctcaggacctagaacagcaccttgcatgtggtaagcaattgttgagtaatttttgcacaaatgaatggatggatcgacagagttgaatggatgccaagacagtgtggaagtcaatttagtgaatcatttgtaggttaggataggattgtgaggatgagcctgtcattaagcaggctctggggttgactccagtgctttagaaaagctgtcttaagttctcgagttgactcatgatgtaacttgtgctttatcccctctcctatttcttttactacaagctgagagtttgacctgcatcagaggctagaaaacattttctgtgaagtgccaaacattaggtattttagattttgtagtaaatgtttcaggattctgttgcaactatttcacactgttgttacagtggatgaatagacaatataaatattccaataaatcccatacacacacacacacatatatacatacacacacatacacacacacacacatatatatatatgtatgtatatatgtatatgtgtatgtatatgtgtgtgtgtgtgtatgtgtatgtgtatgtgtatgtgtatgtgtatgtgtatgtgtatgtgtatgtgtatatgtatatgtatataaagaaaaaagagcctatactggctgctcttccagaggacccgagtttatgtctcagcactcacacactggcccttaactgggaacttcagttccaggaaatctgctgccctcttctggcctcctcaggtaccaggcacacaagctgtgtacagacatatatgcaggcaacatacccattaaaagaaatatatctaaacaaacaagcaaacaaacaaacaaaaaaaaaacctctcagccttctggatcaggctccgggactgtagttatgctccttggtccagacaacttcagcgtctccctctaaccctaacgctgtatgatttaaagatttagaatccatgatgttgagagtagcgatttaccattcatcattatcttgttccagctgctcataagaaatattgttggttacagggttctttctgatgaaaagagctgttttcaaatagtcagtcaaccaaccattaatcacaaacagaaagatctaggtgtggagttctcatctcgactctttaagaaacaaatatttagaaaattcttggcacggaggaagataggaaggaacacagagtggaaaggagtggagaggagtgggaggaagcgagaacaaacccttatccaaccagtaagcctgcccaaggtgggaagccagaccttccatttctctcctacaacctctacaagtttgctagttagcagccagtccacaccactggctgtagtaactcagtacatactgatttttttcttcccttttctttggcaccaaaattgaaaccatggaataatttctgcataaaaggctctgctaacagctggctcctggcttagagaataccttgtggagcccagtacttaacacatagcctttttgtgtctgtttcaatgtctacaaacttcctttgaggaacaagtgggaaaattacaaggaccatgacatctcaacatccatcatggctgcctcaataagacctggataccagttgacatgccatggtggaagggggaatctctcggagcttcacccctagatgataaaatacaggtacttaaagattgccaagagagggggtctttcctaaggatgagcccagttggctatctaatatcaagtgatcagccctaaaagacatacacacatgagcagcactaacctgactcagtaggttgtatcagtatatctattcatatacacgcagaacagtaataattaaagaaagagaggccaagagaggccgagaacttgagaaggaggagggtggggggtgagattggagggggtagacagaggaggcaaatggtataaatgcacaaatatggaatctacagagatggtgccacgatgctgacgtaaggctcaggatttgcaggaaggctcgggatttgtaggaagggaatcttgggttgaagtctacagagaacgatatctcttctgatcattggatgcaatcaacacacaccagggagcatccatagtgggcggaatgcatggcagccatagtttttggctgacatctgaagcctgtggaggatttaggggtaggaagaatgaattcctttaacaagtcaaaggacaccacagctccacgctgattgcagcgatgagtaagaggccctgtctctttcctccagtccgcatcagtgatctctattagccattgatgcaattcattcattactttaagggtcattttaagcccttaatcttaaaaccagtcccaagttgtttcacgactaagagactgagctccaacaaggttggctgaaggcaaggcccttctgtgtgtaactttcatttgtttagggattgctttccaggttccagtcatggaatgggcaccgggcaaacagcggtgcaaatgatttggcagaaatcaacatcagttggttgagccatgcgtcatcttcatctcgagaaggaatttgtattgagcaataggttagagtttcaaaatcccagaaagtccaggaacattaaaaaaaaaaaaaatagaggtgtatggcagagtttcagccgagagtccacgtgtgatgtctcagcttcaggttagggtaacccttttgtgactggttcttctctactagtgagagcaatagtcttgggatttcacaatgctcagggctcaggtgatcacttgcaatgtccctctgctgataacttccaagacagcttctgtcattttcagctctcaggtggttactctgatggcctcatggtcctgcctgaaacagaaagtctgccacctacttctgtagcagcaagactcctgttctgtggctaagcttcctgcctgtgcaagagccacagggaggggccaaatgcatgccactggggccacgcctcctggtaaagacataaatagtgatcctcgggactggtcatcagagctcccctgccttcaccatgaagtcctgcggccttttacctttcacggtgctccttgctctggggatcctggcaccctggactgtggaaggaggcaaaaatggtgagttggagttgctttggtccaacattgcctggagtatcagaggtgggggctcctgatggtttgggctgtttttcagtttactctgacctcagggcgacatctgtgtctcgctggggtctgaggtcttgatgaagtttcaaggcatgtagaggtgctcctcttatgcagccatcctgtcagctcaggtctcacacagctctgtccctgccctttagcctttctgtttgtttctgtctctggctttagttctcagcatctcacatattagttcccttcctatttatttctcttggtctccattattcctgctcccaccttctgtctttgtgagatcttgcttagccctgaggtagaaaaccttgactgggagcccggtaccttttatcctcagtctgatttttcctggtcacatgtcttggttgaccaagtctgacttttcctccctaggtcagcccggtatttctctttgaagttgtgggccactggaatgagggtctatattctgagatgtggaccttcgtctaggaatgatgatagtccgtaccctcctaacatcttgagcttctctttagatgctatcaaaatcggagcctgccctgctaaaaagcctgcccagtgccttaagcttgagaagccacaatgccgtactgactgggagtgcccgggaaagcagaggtgctgccaagatgcttgcggttccaagtgcgtgaatcctgttcccattcgcaaaccaggtgagccagcagagaaaacagagaggggacaatcaacgtcaagagccacccagagtgaatgaagagtccctcccaggcatccttgtttctaagagctgttgggtccaacatgtcagttagtcaaggcctcttgctgccattggcaggaagagccatttgcctgcagttgccactctgtgaggatgatggctttacaaccattcggccctttcggggctggagagctggtcccctgcattggctggaggctagatggtagcgaggaagcaggtcctctttcaggaggcgtgtttgggaggaggtgacaaaggtgatgggtggatggggacgaacttcctcgctcaggaaggagatgttgggttaaagacatggagatgtgttgcctgagccctaagacatcggccctgtgaatcctttctcaacagtgtggaggaagcctgggaggtgcgtcaaaactcaggcaagatgtatgatgcttaaccctcccaatgtctgccagagggacgggcagtgtgacggcaaatacaagtgctgtgagggtatatgtgggaaagtctgcctgcccccgatgtgaggtaaggagtgggctggggtaggcagagctcatttctctccagcccttttctgcttcaaggttctggagctcgaagcacatgcgccaggagattctattctaatcaggagcccctgtctgtttgccgtttaagggaactgtcccctgtttcttagggcaaagcttagcattgcctgaggctttgatcctgtggcagcctgtcagggtaagggcctcgggtgaatggctctcagagtctctgcctgcacaatagaaataccgaagttgaagttttgcgaggcacagtatacgttatttgcttcccatgttatttacttcatggtgtctctctggtcagagcacaaaggataggtataatgtgaggaatgtctagctcagtgctctgcgttttgagttttacaacgacaacgagatttgaacctgttctcctgaaaccccagatcctctcaagtccagccccactttaccctttgaccgttctcagcatgctcccttacaagggctggataggaatgatctagctggttcctatgttgaaggtctttccttactttctcttgtagcctgatccctgacattggcgccggctctggactcgtgctcggtgtgctctggaaactacttccctgctcccaggcgtccctgctccgggttccatggctcccggctccctgtatcccaggcttggatcctgtggaccagggttactgttttaccactaacatctccttttggctcagcattcaccgatctttagggaaatgctgttggagagcaaataaataaacgcattcatttctctatgcacaccgtgactctgattcactgaggggatgagatgggtgtggtaggaaccaataaaggaaggatgggaacgaggcctccctcttacattccgggaggagaaggatgagaattccaggcttgggcatgcttgaaccttccaaatatcatgtttttatctgcaaagtggcaacagggaccgctttcttacaacgtgtagtgcaccagaggttgcagaatggtgcaaagtgtgtgtgtgctatacagctgtgctttaccagagtgccttcacacaccacggccacttattgctacccggcgttatgaaaatgcggtgcatgtgtgtgcacgcacacacatgtgcagtgtgcttacttgtatgtgtttttgaaggacagagtaggacaccaggtgtcttcctctgtcactttctggttattaccttgagtcaggatctctgtgctgaaccaaaagccgaccaatcagggctgggttcgctggtctgcccatccccttcctccggttactggggttacaggaaaatgcaccacacccggctttttatgtgggttccggggatttgaactgagttctgcttgtgcagtgaacgacgtgttcactacccatctccccagtgccccgccccacttcacagttctactaaacatacactgcagaagaagagacgggttccagtcagtgtgtgctccgagggtagctgcaatgatggcaagtaaaatgtgaaaaatgagaaatcacccattttgggagtatctccaacactttgttgtgagtgtgactgctggaggaatggctcagcagttagagcactggctgctcttccagagttcattcaattcccagcaaccacatggccactcacaaccatctataatgagatatagcgccctcttctgtcatgcaggtgcacatgcaggtagagcactcgttagacataaagtacacttaaataacaatcgaaaaaagaaaaaagagtaagactagaaataaacatgaagggaaacgcacctgaaatgatgtttctaaaacacatattaagttgaatttccaatagacttctcactgaggtcagaaacagcaggggaaacactgttctccaacaatgtacaagatatctaaagcaacacaggatgctacgccaatggagtgtgtaagatagggacagacgctttcccagcagctgacaagatgcctaaagcaacacaggatgctgcactaacagagtatgtataagataggaaaccatacaaaatggtcatgtttgatttctatttttaagtgtaagtgtgtgtgtgtgtgtgtgtgtgtgtgtgtgtgtaacaaagtcttatgtagctgagactggcctcaaactttttatgctcctgcctctacctcctaagtgctgggattatgggtgtgtgcctgccaccatttttgcctatcttaaatattatcattttatatggcaattttataacactcaataacattagtaagccaagattcatcaaagttgctgggcatacagcctacacagaattctagaacattccaattaacaataagaaataacacacatggagctagagaaagtacccaaggagctaaagggatctgcaaccctataggtggaacaacattatgaactaaccagtaccccggagctcttgactctagctgcatatgtatcaaaagatggcctagttggccatcactggaaagagaggcccattggacttgcaaactttatgtgccccagtacagggtaacgccagggccaaaaagtgggagtgggtgggtaggggagtggggaggagggtatgggggacttttgggatagcattggaaatgtaaatgaggaaaatacctaataaaaatattaaaaaaagaaataacagacataaagaaacaaactgtgcaaaaaaatctctaaacaataaagttttgacaatatctactgacttgaatggtaatctctagaagttattcattttttgtcccccccccataattaaaagattaatttgtatctgctcttttaaaattggcaaattataattgtgtatatttatggaatataatatggaataaaatttctggttttttaagttgacaagttataactgttcatattaatagagatggtgtgatgttttaatatggtacacagtatggaataattaacttaagatagaagacatatctattgtcagggttctctagcagatcagaaatgatattataaaaaacaaaaatcaccctgagtgaggtaacccagacccagaaagataaatatggtatttgttcacttatatgtggatgttagccattaaataaatgataaccaacctacagcttatatgaccagagagtttaggtagagaggaagggcccagggcaggggggcacatggatctccctgagagggggtgatagaatagattttgatttttatagattaggtagggaatgggaggagaaatagggttgagggaggaaatttggggagagacagctagaatttgggggcatttaagggatgatatgaaaacccggtgcagtggaaaccctcctagaatatatgagggccatcctaatgaggtctcctaatcatggcagtaatggagtcaccattactggccatctcttgtccccaaatcaggcttccagttctgggaatggctttcatttcagtgagttgttgaccaagggagtcccatggaaaccctcaaatcacccctgggttgctaagacaatgggttgttctctgtaaacgttgctgaagacgacacccacacaactcaacgaacatggagaagtcaggctggtgcctacgtggagcctttaactgtatattccagtgtcttcagtgtgagcaggcaaccaaaagaggaatacaaacaccagcccagccacaaaacctttgacctacaatccatccctggggtaggcgtaggagtaaatggttttgcacggagtaaggattatccctgcgttatccaggggtcatttctctgtgctcacatcttgtttcaatccggacacggcgttgtagtgcttaggtcaagaatctccctactcaagtttgtgtaaacaattcttaccgtttattctctgccttgtcagtgggcagaggagagaatggcgtggaaagttccatcagccagaaaaggagagagagcgagcgagggagattcaagtcggccacggggagaaggtccgaggagacaccgtgggaagaaacatctgaagcggagggagccagaacaatattaacatatcatgggaccggagccgggaggtaaccagattagcataaggggttaaggtagatcattaaactgctgaggtattgccgtgacgcttgaaatacatcttggtttctctgtgtggttattggggactagcaaaggtaaagaaatacagctgctggtttaattcactgattacacttgtattaaaacgatacattttacagatagtatttaattttaaaggccacagacctttgtctttttctctcatactgatggacacttatcttgatcccgtgcctcctgctgtaataaatacgtgtgtattcagctcttctccacactgactttgtatcagtttccacacatacagaaagcgaggatcactggactttatgatagctcgatttttaacttttatttttatttttttgagtatgtgaacaatgggtgctctttcttccttccttccttccttccttccttccttccttccttccttcctccctccctccctccctccctccctccctccctccctccctccctccctccctctctctctctctctctttctttctttctttctttctttctttcttcctttctttcgaaacagagtctcactctgcaccccaggctggcatgggactcgaactcatgaagatttatatgtttctgcctctcaagtgctgtgattacaggagtgtgcctgcccatctgactttgtgtggtttcgacttttggacagctctgaataaagttttccaaaccaggcatagcgatttacatcttcatcagtgccatgctcggggttgctgtatttcccacatccttaccaatgtttggctcgtcgttttgccagcagtcactcccatggatgtgcagtggggctggtgttctactctgcgaacccatagccattagtgccagtggatactttcttcatagatttgctgaccatttatatatctttcttggaaatatacacgatcagatatcttgtttatgtttaacttttgttgagggaagggaaaggaagggtttattctgcttacatgtcttggttcatagttcatcacaaagggaagccaggacagaaacccaaagcagggaagtagggactgaagcagagatcatggaggaatgatgcttactggcttgttctccatggttttctcagcttggctttttcaacaatcaaggtccagctgtccaagggtggcgccttccacagtgacctgggccctcccacatcgatcatgaatcaataaagtattccacagacttgccaataagatagaggcatcttctcgattggagtttttctcttcccatgtggctctatgttgttccaagttaacagaaaatggaccctttgtcaaattgatgtgcagacacatcactgttaaaccataacctttcctttcttgcttatgcccaagttctcgtgttaataatattacattgtatattacattataaaatacagtcccaaaccaggctgtttcggtcggcccgcaacaactgttgagtcatttaaattgttcatgtgcttgaatatcaacctctcattggatatatgatttataaatattttctctctgttgctgtataggcctcagactgtaaatttaagtgtggccagcagagggctccattgtgcaaagaaggaccagtacttgggtgaagatggctctgcttaacatcaggctctttatccatacaggctcagcaacagagttaaccatgtatgggaatgggtccataggttacactgacccatttacctcaatggccaaaactggtagtgcccaacttttgagtaccttagtaaaggaattactctaaaattttctttctttctttctttctttctttctttctttctttctttctttctttctttcttccttccttccttccttccttccttcctttccctttttaacaatttttaaaatgttatattatttgctatttcctttcatacttatgtttaatcttgctcacacttttcattaatgggcaatattgtgactctacctcactgttttatttggtcttattttctttcttttctttctttctctctctctccctccctccctccctccctccctccctccctccctctttctttctttctttctttctttctttctttctttctttctttctttctttctttctttcttattagatattttctttatatacatttcaaatgttatcccgaaagttccctataccctccctccaccctgctcccctacccatccactcccacttcttggccctggcgttcccctgtactggggcatataaagtttgcaataccaaggggtctcttttcccagtgatggccgactaggacatcttctgctacatatgcagttagagatacgagctctgggggtactggttagttcatattgttgttccacctatagggatgcagaccccttcagctccttgggtgctttctccaggttctccattgggggccctgtgttccatcttatagatgactgtgagcatccacttctgtatttgccaggcactggcatagccttatatgagacagctataacagggtcccttcagcaaaatctttctggcatatgcaatagtgtttgggtttggtggctgattatgggatggatccccaggtagggtagtctctggatagtccatcctttcgtcttagctccaaactttgtctctgtaactcctttcatgggtattttgttccctattctaaggaggaatgaagtatccacccattggtcttccctcttcttgattttcttgtgttttccaaattgtatcttgggtgttctatgtttctgggctgtttttattttcatgttgcaagtgtttcatctgcatgtatataagtgcactgcttgtgtccaatatctatagaggccagaagagggtgccaaaatacctaaaactggagttacaggtggctgtgagctgtcatttactctctctcaatctctctctctctctctctctctctctctctctctctctctctctctctctctctgtgtgtgtgtgtgtgtgtaagagaacctggtttttctgtaagtggagggagtgctcttaactgctgagagccccctttctactgagacagatctcactgtatatctctggctagcctagaacttgctatgtagaccacatggccttgaactcatacagatccaccttctgagaataaaggccagtgcccctatatttggctttttcactggtctttaaaaattaagtagtcctgttttatttttttcttgtcttgtcttttctcttcttcctcttccaccacctcctcctcctcttctcccccctcttccttcttctgtttttttgggacagggtatctctgtgttgccctggctgtcttggaattcacaggccaggctcccgtttgtatttatttccttctcacatctatctaattttgttttttaaaagttttttcattatttgggttttctttttattaaatgttttttaattgaaatagaattgtatcacttctccctcccttttctctctcaagctcatctcagtcacccgccctgaacgcttcccaggcttctcaccttccaattgatatcctctttatctttgactatactcatcacacacaggcacacacatacccaaaatatatacatgtgtatgtacaaatatgtgagtcatgtggtcacccatggattccagtcaaaccagcaattgttggcccattaaaatgtattatttataagggccaactgttatttggatgtatagctataagtcattaaaggaatcagataatttgtttataagtctattgttttcagataaagcagagctagtaaaatttgttagagtccagtcccccctctctctctataatatataacatatataatacataaatatatagtgctgagttaatctgttgattgggtgatagatatggcttcaggggtgaccactgtgttggacaaacaataagagggctcattcacaagagaggctaattcttcttctccccgcagactagagtagcttgtggttctttctttaagggtgggacttcacacagtttttcttctcctacattaacatgccgatcgacattgctattgttctggtcttgtttctgtagccattttaggagaggctgtttcacttcagacttcctcctactctggctcttacaatttttgcactctttcctctggcatggtaccctgagctacggatgagggagctgtggtaccaatgtatttttggggtgctgggatctttatactgtgggtctctgctttgtgtccagttgtggttttctgggatggtctctgtttgctgtagagagaggcttatctgatgagaggtggtagctacactgatctctgggtataagaacaagatgcagagaaattatgctggcctagcaaagcagtggtagtagattcttttcctttttatttattatttaattttattttaagatttattgaagcctgataaacagcttcaatgaagtagctggatataaaattaactcaaacaagtcaatggcctttctgtacacaaaggataaacaggctgagaaagaaattagggaaacaacacccttttcaatagtcacaaataatataaaataccttggtgtgactctaactaaggaagtgaaagatctgtatgataagaacttcaagtctctgaagaaagaaattaaagaagatctcagaagatggaaagatctcccatgttcatggattggcaggatcaatatagtaaaaatggctatcttgccaaaagcaatctacagattcaatgcaatccccatcaaaattccaactcaattcttcaacgaattagaaagggcaatcggcagattcatctggaataataaaaaacctaggatagcaaaaactcttctcaaggataaaagaacctctggtggaatcaccatgcctgacctaaagctgtactacagagcaattgtgataaaaactgcatggcactggtatagcgacagacaagtagaccaatggaatagaattgaagacccagagatgaacccacacacctatggtcacttgatctttgacaagggagctaaaaccatccagtgtaaaaaagacagcattttcaacaaatggtgctggcacaactggcggttatcatgtagaagaatgcgaattgatccattcctatctccttgtactaaggttaaatctaagtggattaaggaacttcacataaaaccagagacactgaaacttatagaggagaaagtagggaacagccttgaagatatgggcacaggggaaaaattcctgaatagaacaacaatggcttgtgctgtaagatcaagaatcgacaaatgggacctcataaagttgcaaagcttctgcaaggcaaaagacaccgtcaataagacaaaaagaccaccaacagattgggaaaggatctttacctatcctaaatcagataggggattatatccaatatatataaagaactcaagaaggtggacttcagaaaatcaaataaccccattaataaatggggctcagagctgaacaaagaattctcacctgaggaataccgaatggcagagatgcacctgaaaaaatgttcaacatctttaatcatcagggaaatgcaaatcaaaacaaccctgagattccacctcataccagtcagaatggctaagatcaaaaattcaggtgacagcagatgctggcgaggatgtggagaaagaggaaaactcctctattgttggtgggattgcaagcttgtacacccactctggaaatcagtctggtggttcctcagaaaattggacatagtactactggaggatcccgcaatacctctcctgggcatatatccagaagatattccaaccggtaagaaggacacatgctccactatgttcatagcagcctcatttataatagccagaagctggaaagaacccagatgcccctcaacagaggaatggatatagaaaatgtggtacatttacacaatgtactcagctattaaaaagaatgacttatgaaattcttagccaaatggatggacctggagggcatcatcctgagtgaggtaacccaatcacaaaggaactcacacaatttgtactcactgataaatggatattagcccagaaacttaggatacccaagatataagatacaatttgctaaacgcatgatactcaagaagaacgaagaccaaagtgtggacactttgccccttcttagaattggaaacaaaacacacatggaaggagttacagagacaaagtttggagctgtgacgaaaggatggaccatctagaaactgccatatccggggatccatcccataatcagcttccaaacactgacaccattgcatacactagcaagattttgctgaaagggccctgatatagctgtctcttgtgagactatgccgaggcctaggaaacacagaagtggatgctcacagtcagctattggatggatcacagggcccccaatggaggagctagagaaagtacccaaggagttaaagggatctgcaaccctataggtggaacaacattatgaactaaccagtaccccggagctcttgactctagctgcatatgtatcaaaagatggcctagtcgccatcactggaaagaaaggcccattggacttgcaaactttatatgccccagtacaggggaacgccagggccaaaaagtgggagt

SEQ ID NO: 1217 - DNA, 1079 bp, Mus musculus
gggatgccaaacccctacctaaccagaagaagagaagaaaggccactgccgaggtcacttccagtacttggaggagaaagcaacgttcccatttacagctgagtaacaggagccacaaggtatgtctgactcaaaagttcaggctctcgatgactgtgcggtgctgcccagtgtgtcttcttcaatgtaacctcaggacctagaacagcaccttgcatgtgctctcaggtggttactctgatggcctcatggtcctgcctgaaacagaaagtctgccacctacttctgtagcagcaagactcctgttctgtggctaagcttcctgcctgtgcaagagccacagggaggggccaaatgcatgccactggggccacgcctcctggtaaagacataaatagtgatcctcgggactggtcatcagagctcccctgccttcaccatgaagtcctgcggccttttacctttcacggtgctccttgctctggggatcctggcaccctggactgtggaaggaggcaaaaatgatgctatcaaaatcggagcctgccctgctaaaaagcctgcccagtgccttaagcttgagaagccacaatgccgtactgactgggagtgcccgggaaagcagaggtgctgccaagatgcttgcggttccaagtgcgtgaatcctgttcccattcgcaaaccagtgtggaggaagcctgggaggtgcgtcaaaactcaggcaagatgtatgatgcttaaccctcccaatgtctgccagagggacgggcagtgtgacggcaaatacaagtgctgtgagggtatatgtgggaaagtctgcctgcccccgatgtgagcctgatccctgacattggcgccggctctggactcgtgctcggtgtgctctggaaactacttccctgctcccaggcgtccctgctccgggttccatggctcccggctccctgtatcccaggcttggatcctgtggaccagggttactgttttaccactaacatctccttttggctcagcattcaccgatctttagggaaatgctgttggagagcaaataaataaacgcattcatttctctatgc

SEQ ID NO: 1218 - protein, 146 aa, Mus musculus
IVILGTGHQSSPAFTMKSCGLLPFTVLLALGILAPWTVEGGKNDAIKIGACPAKKPAQCLKLEKPQCRTDWECPGKQRCCQDACGSKCVNPVPIRKPVWRKPGRCVKTQARCMMLNPPNVCQRDGQCDGKYKCCEGICGKVCLPPM

SEQ ID NO: 1219 - DNA, 22324 bp, Homo sapiens
accgccacagaggccatgttctttttttaatatgtcttatcaaggcccacaacttccttagtgacaagtcatggcttcttttttgttggtccttgagtaaatggatgtctccctttggggagatatgccagcccgtgggggaaaaatgtgagaaacatcttggtcttcaatccgacactgtcacaaatcatttcttgggaggggaggtttcgaatgctcctgccaccactgaattttcttggcttctacttctggttcagacatttgctgctgttgccccagatcccagctctccccatccatgagttctctaactcttctttgtactgtttttttctgagggcaaccacctttctcagtctctccagaattgctaagaagaatccaacctgcacaaatggcaaaattcgagccaagggaattcaagccttctggtaaaagaaggaggtggacacccagcctctcccttgaagtgcattgctgctcttagaccaacagggatgactggacatgctgcccctcccatgtttttattcctttctcagcttctccttgccctgtctccacaagtgattttttttcttttaaatttttatttttttcttttatttttctttagagatggggtctcgctattttgcccaggctggtcttgaaatactgggctcaaacgatcctcccaccttggcctcccaaagtgctaggattacagacaccagaatagagatataattgcctccattttctatgggaaaatcttaaggcacactctaggtttgcaaatcatgctaattcctttccagcatgcaccaatttataacttgtatgtcttattttgtaggggatgaccttggttagctgtctaattgaggaagaccttaaacataaatgcacatagaggcattgctgattgataatttgatttatgttcatgggaggaaaaacaacatcaaacaagagagctatggttaggtgcttattgtttattgatgctaagtctctttctatgtcttttaaaacaagcaatgaggctgaattttcagagaatgcagatacctaacaattggcctaagggttgtcctgcctaatttggtaaaaaagtggcagacaactgtacattatttagatttaccagatgaacatataaaaaaaaccaagtagaaatactggaaataaatgattattgaaataaaaattcattacttactagatagaactagcattcgacccagcaatctcattactggatatatacccaaacgaatagaaattgttctaccatgaagacacatgcgtgcatatattcattgcagcagtattcaaaatagcaaagacatggaattaatctagatgcccatcaatggtggactggataaagaaactgtgatacataaacaccatggaatactatgcaggcataagaaagaatgaaataatgtcctttgtagcaacatggatggagccggaggccattatcctaagtgaattaaagcagcaacagaaaaaccaaaaacagagtatcacatcatctcacttataagtgtgagctaaacactgaatacacgtggacacaaagaagagaacaataggcattggggcttacttgagagtgaagggttcgaggagggttaggactgaaagagtacctattgggtattacctgggtgacaaagttatctgtacatcaaatattaacatgcaatttacccatgttaacaagctgcacatgtacccttgaacctaaaataaaagttggaaaaacattggataaagtagagtttagactggatgcagctgaaagaaaacttggtgaatttttagccagtactgagaaattcacccagagcccagcacagagagatgaagagaaaaatataagagaaaggcaaaacaacgataataaaaatagaaggtctagtaaatatccggtggaagttccagaaagagactggagagaatggcacagaagtaatattcaaagagataaagaaaggactttttcttttaggattaaattaagacatgcatcttcagactaaaagtgcatatttggagtaaagcagaataaataaaaggcaaacatgactcggcgagatttctgacaatagttactagttcatgcttttatatgaagcaaatggaccaggagccaactaaacatgaaaaccaagcctcataatggccactgattgttcatgtcgatccccacatcctgctgcacctatataaagtgaattcttgaaaaggtgcagatgcccttccttccccaacaaaagggcatcctctgcaatactcctccaagatgtagccatggaaggtgacaggcaaaggagaggctcccagacagcagaactggattcttcagatttattgagtaaggaaatcactccaacattaggtaggaagtcctcacatccctgtcttacaggatgtacaatccgtattacgggccagtgacaatttgtatatatcttcctatatttcccttttgcaaataggactttttattgcagtcattccgccctcaatctaccattctatattgggtgcatttgaagtggttaaatttacttaagcttattaaacttaatctgtgaagactataaatttaactgacagaactgctttcacccacattgcagaactggagatgaatatagtacccagagagacattttgttgtctttctttgggagagaggttgagtgcattttatgtagatgttggtttagaaagtatttgaaaaaatttagttatgtagatttcagtaaccaaaaggggtatactttagagaacactcactgctatttttaccactgagcatcctttcacccttctgctggtagctatatcctaatttaccccaggagaatcattccctctcccactctgaaaattccactggatttggggatgagtacacatggtgatgagtattgtggccttggcttaaaccaatcggtacatcccagttccctggtcccaatcattggtttaaagatttaattctagccactcctagttagttgagttgcccagaaaaagcccttactagacatgaatttgggaagatgggaggagatgccacagccatattataaatgctaagagggagcctgactaagaatgaagccaacatgaagagaagtgccgtggagagaatcttgtgggagctatagtttgagcccttgctcaaattgcacctgaaaatagcacctattctccttggtttattcagcactctcacttcttgcatctttaagatcattttttaactttccgccgaaggattatctggacagtgctactatcccaggcatctccaactctgggtttaggactaaagaagtcttggagggaccataatgaagcagtatgtggctgaattctgaagacttgggtttgaatcttactgtacctctgacttgctgtgtcatcttgggcaagtgggcttactctctgaggttccatttccttttctttaaaatgggatataaaagtgcttggtccactgtgaagttcggggtcatgcatggtgtctattcctaggctttttattcaggaaagttggctctctgggtcctgagagtcctctataaggcaaaaacccagctagaatctaagacttggggcctctaaagagcatctgttccaatgcactgatcttacaaatagggaaactgaggcccagagaaaggaaggttctacatcaaattggacagagctgggattccagcccagtgtcctgagtccagtatcatcgtcatgcctctctagctgaccacagggtcccagaggccagaagtgatgctatcaagtgtgagtctttcatggtctttctggcactctgctctgtttgggccacagaggtgtcctcatagtggtgctctccactgaccccaggcttagacaccaaactctcccatagtaatgatcaaccaggcatcgtctgccatgtccatctaagaccctaccatctcctgatctgcaacaggaacgtttctctgagactcactttttctcatctgtaaactgacttgacattagtatctaccaagttttgtgtgacgcttaaatgtaacaaaacatgctaaaccaaaggagatggattctagtgatttggggacatcttttcccaagctgcttatagctctgttccacagtttaataatccagtttttctattcccggttttcttccatgggtagtcatgatggcagtttcttaatgccgagcactgtttttctttttgttttaccaggtccctaaagcatttcctcatgacataccacagactttgtttctttaaccttaggttaactggatcccttcctctagggagacagacatgcagtttttgaaggaataaagtgcagagccctgatctgtacaccaaccatctcttgcatggtaataagtatgaagacacctgagatccaccgttgttggttaatttctcctgccaattctttgatggtggatgtttttcacccttgcccagattctgctttactgcccttcacccattcacttgtgggcctaaaaggacagttcatatttccagattttattaggactatgatgagcagtaggggaggaagtacaaacattgcagaattcaaactttcttgggtgggaaaatgataaggagtggctaagccatctgtttctctggaaggtctagggagatccagttgccatgtccaccacctgtggatgacacttccagaggtgatttaaatgaccccacctcccttgcagtcatctctttctcatctactcttcctgtctcagctcggggtttttttttccccaatactctccccaccacacctactacatctccatactccctggctctgtgtctccattcccatttggtcattattgacgttttatgtattttgtttaagacaatattttaagctaagttataaaggcaactatgaaagtcagaaaattggctgaggctcttggggagagctgatggcctcagaggaagcaggatgaagctgtttcttagagtcacagttaccgtcttgggacaggtagaggaactgaggcccagggaaaggtagttgctgccttattcacataggaatgagctgtgaaaacctggttgtctgccagattctgaaagagttttttgttctgtgttgttttttggttttgagacttggaaacatagtgaattttaggtaagaacacagtgacttttagttaagggtgaagctggcatctgctatcagaatggggcgacccgaaacacattcttccttagacctgagcaacggggctccttccctgcacctcacacttcaggtcgctctgtgccttggggcgtcttcctcaaaattgtctatgttcccctggagtgcctgaagccagccaggatcaatggtgccatggggcagagaatcccagcttggactgagaactgcatgggttctagtccaagggggtgcttctcactctgtactccttcccccattgctagaatctagggcagtcatcctaccaccttggatggctcctggcaggagcctgtggctgctcctgtctcttcctcagggctttccaggccatctctgtgcaactccaaaggggcttttcagttgatgtctttttttttttcctctgattgacctatgctctctcgggtcagtgttgagccataatggattaggcagagacatttcttgtgcaaatgagatgctcctctcacttcaaccctgagcccctccagggctggctacataatttacaagactcaatgcaaagtgaaaatgtggagctgcttgttcaaaagcaggaaaaaaagtgttaacggtactaaaattaattttttaactttctttggcagtttctctctagatctgccatggtgttaaaaaaattatttactgttgctcctccacaagtatgtggatactcacagggagagtgcagactcccagaggtgcgcagggtccctgtcccgctacttggtgtgtgcaggacccaccagctgccagggtccccctgtcaccagcaccctggtagtcagggacaagcggccacactaacaacatttgagacagtaattggaagccagtattcagagaaggcataaaggatgatgcagcctcacaagtaatgatgtaaccaactttaataaatggcattgggaagtgcagaggcaagcaggttccatcagccagggttttccagagaaacagaaccaatagttgattatctggctatctatctatctatctatctatctatctatctatatctatctatctatctatatctatctgtcagttaagatctgtctatctgtctgtctacctacctaccaataggcccaatcaggtctattttgtcaagaaataagaccatgttttgtcaaacatttaatgggacagagccagatgggtccagacccaaggactaagctatttagttaaagactgacagctccctgtgcgcttaatgtgtgcagggacacgccggtaataaaaacaatgtgtaatgtactgaggggaccagacagtttgctgagtgctttccaaatactcctcacaacaactgtacgactccagaggcagcaacactctcatttttcagtggaggtagctgaagttcaaagaggttcagtgatttgcttccaacctgtaagtctgactttgaagttcaggttcttaacaaccatgtggtgtcgactccgtgggcgtgctcttttctgtagccctaggcctagtgcaatacctgacatgtggtaagaaatgttaaacaacttttgtgtgaatggtttgtataaatgaatgaaggaatctataggatttaggtagaaggcaataaagggtgtgtgaaatagatttttttttttgagacagagtgtcactcttgtagcccagtggcatgacctcagctaactgcaactctgcctcccaggttgaagtgattctcctgcttcagcctcctgagtattacaggcacacaccaccatgcccggctgatttttgtatttttagtagagatgggatttcaccatgttggccaggctggtctcaaactcctgacctcaagtgatccacccacctcagtctcccaaagttctgggatcacaggagtgagccaccactcccagccttgagatagattgaatgagtcagtctcaggttaagatttggttaggagtggaagtgtcctccaccagacaggttctggggatcagcatgtgagtaacctgttttagaaaagctcaatcttgtgtgtgtcgttaatccgctatgcagctttgggcctggatcttcttctaagggattcagtctcttttatgcaagctgtgggtttggtctaggggttagcattttctgtaaaggaccagacgataagtattttaggctgtgcagtaaatattttaggtccctgttgccattgtagtggaaagatagccttagacaatacataaattaatggatgtgtggctatgtgccaataaaactttatgaaaacaggtaactaggtggatttggtccaaggactgtagtttgctgatctagaaaacccttgaagtcctctttttagtcttaacattctatgatgtaaacatttagaaccaattatgtcaaagataataatgattatatactattatcttcttatgacacccatggaagacattgctaattgggcacagggctcttttctgatgagaaaggagctggctctaatcagtcaatcacagattgagcaatcagtcaatcacagatttaaaaaaaacttaagctgtagcattttccttttaatttttttttttttttgagacggagtctcagtttgttgcctaggctagaatgcaatggtacaatctcagctcactgcaacctctacctccagggttcaagtgattctcctgcctcagcctcctgagtagctgggattacaggtgtgtgccacactgcctggctaatttttgtatttttagtggagatagggtttcaccatgttggccaggctgctcttgaacccctgacctcaagtgatccgcccaccttggtttcccaaagtgctaggattacaggcataagccaccgtgcccagccccttttcattctttaagaaataaatatttagaaaactccagataatttcttgagtgtggcactgaggaaaataggaacaaacagagagagagagagagagagagaacaggaactctgtgagagaaatcaaattatcccctgggtggtggaagtgagaacaaaaatcttgacctgagagtgtcattacccattggtggaaatcatagcctccatttctctcttacctaccctactaagtactccaactaagagtgaatgcacctggctcatagtagttaccttgtgcatattaattttcttccttttctttttccaccaaaatttgactgatgattgattatgtccaagtcttctgatccaccaaaattcaaaccatggagtgacttttgtataaagggatctgctgccagttgcctgtttggttgtggaatacttaaatacttcatgtggggccatcgctacttgataatgagtgggtctttcatgtctgtggaaagttccacaaaccttcaccttaggaatgaatgggagaattccaagcatgaagataatgagtcaagagcttggagtttgtagctagatgagctttggttgaattttattttattttatttttttaagacagggtatcgctctgtcccccaagctggaatgcagtggcacaatcatggctcactgcagcctcaaactcctgggctaaagcgatcctcctggctcagcctcccaagtagctgggactacaggcatacgtacgtcatcatgcctggctaattttttacatttttttgtagagatggggtctcaatatgtggccagggctggtctcaaactcctactctcaaggaatccatacacctcagcctcctgggcagctgagacagcaagtgtgcgaccctacactcagctatgggctgaattttagagataatggtcgctctctttataattagaagcaacctatgcagactgggtagcaaatagaatgggtttaattttttgctgtcatgtgagatctgtaagggattttggggaattttaggaagcaatcctctaagatctcaaattatctcacagctaaatgtagattacagtgactgatgagctgctttccccctttatctcagattcatttcaattctctttagtgggaagggatactattcatttgttcttttcattcagagtcccttcatgcccttaatttcataaccctctgagaagggctgacttgttagtatcatttcatttcacagctgagacaactgagctccagagagatttgtggagagcggagctcttcttcagctttcatttgtgagtgcttttcctgtgtcaggcacagaacaggcactggggatataacggtgtaaatatttcagggaactaagtatcagttggttgaacgagctgaacttttgagaaagaaactgcattgagtaatcagcagagtttcacaatgcctgagagtccagtaatgtgagaatcagaattagcaatgtgagaatagaatgtattgcacaaagtctcagcagggagtctgtgtctggttttagttccaggtccgggtagcacctttgcaattgaccacttcttccctctctccacctataaggctaatggcctgggatcttgtgatgtttagggctcagatggacactgagatggcctctttaatcaaccaacttcccaggccaatctcttccctttcttttctgatagttgctgtgttggcctcatagccttacctggcataggaaagataaacaatctccttggtgtcaggatttctggtctctggctacgtttcctgcttatgcaatagtagctgggagaggccgaaagaattctggtggggccacacccactggtgaaagaataaatagtgaggtttggcattggccatcagagtcactcctgccttcaccatgaagtccagcggcctcttccccttcctggtgctgcttgccctgggaactctggcaccttgggctgtggaaggctctggaaagtgtaagttggagtcactctggtctaatctgggctgcagggtcagaggtggggtctccttgtggtgtgggtgtgtccccttctgtaggctctgatccctcagcttagtttcgggagacctccctgagggtggaatacatgtctggctgagctccaaggtttgtgtgacagtttgagcttctggaaatgcttcctctatgcagccatgctgtcagcccaggtcccactctctctctctctctctctctctctctctctctctcatactccgccttcttcttcacctgtctgcgactctcaaatcattagtttctgactctgcttccttgtgtctttgcttctgctattttgtctctgtgcttctgccttgggctttagctctcaacttctctcacactggttctatttatctttgtttacctctctccatctccatcactcccagccttcctctctgcctttgtgtagccttgttttgctcttgggtgggaggtcttgactagaagcctgctgcccttttcttgggtgtgaaacgtcccctgtccatttgtctaatttaatcaagcccatcaatacacctggagatcaggcaggcatgaccctttgggctttgtggacagctactgaggtaagggtctctccccctcaaaagtggtgctttgttcaggaggcatgatgggtcctcagtacccagcctcctcctgacctcttgactttctcttcaaaagccttcaaagctggagtctgtcctcctaagaaatctgcccagtgccttagatacaagaaacctgagtgccagagtgactggcagtgtccagggaagaagagatgttgtcctgacacttgtggcatcaaatgcctggatcctgttgacaccccaaacccaagtaagcaggtcggggaactgggtagagaggagtgagcctggggacacagcattagagggatggaactgggtgatgggtcctgccaggcctccttgtcaatccgtcagtgagtcacactgccctaagcaggaaggtagccagcagctggtgaagcagcgggcatttagatagccaggtagttggaagcctcccacctagtcagcactgggtggctggccacctgcatcaatggggggcctgaagttctaggagagccaggtgctatgtttgggggccgccttagggagaaggtggtggtgatagaggtggggaggggatgatcccccctgctgaagctggagcaggggctcactctaaaaagtggggatgggaggggttgtataaagtacaaggcctctgaccggtagcctcactctcacccagcaaggaggaagcctgggaagtgcccagtgacttatggccaatgtttgatgcttaacccccccaatttctgtgagatggatggccagtgcaagcgtgacttgaagtgttgcatgggcatgtgtgggaaatcctgcgtttcccctgtgaaaggtaagcaggggatgagggcacactgagctccctccagccctctcagcctcaaccctctggaggcccaggcatatgggcagggggactcctgaaccctactccaagcacagcctctgtctgactcccttgtccttcaagagaactgttctccaggtctcagggccaggatttccataggatcgcctgtggctttgattctattctagtgtctctgggtgggggtcctgggcaagtgtctttctgagtctcagtttctttatcggtaaaatgtacataatgagattgaaagtgctctgcaaagcactatgtgcactaagaatttattattcaggttgtttccatcatgttttctgaggtgaaatcacaaaggatcagtggagtttgaggattatctagttcaatgctttgagtttagagttttacggtgaaaatgagacttgtctcctgacactaagtctctctcaactatagcgctatcttgctattttctctatctcagaaggatccttgggcaggaggaaggatgtggatatgatttggctggtttctatgctgaagctcttatctgattttctctcacagcttgattcctgccatatggaggaggctctggagtcctgctctgtgtggtccaggtcctttccaccctgagacttggctccaccactgatatcctcctttggggaaaggcttggcacacagcaggctttcaagaagtgccagttgatcaatgaataaataaacgagcctatttctctttgcacatcctgcttctgtgattcgttgggggtatgagtggggtgggaagctgtgagggaagatctagatatgaggcctccttcctatgaatacgtagtgggaggaagaggcttagggactgggggaacttgaatttatatcatgagtgtgaaagtgctgactctgtgatttgggacaagtgattttatctcctaaatttcaatgggattagggatgtacaataacatgaagaatcagaaacctcaattttactgcctctggcaggattgtcaactgcaggtgaaaaactttcctgagacgagtttatgcataagagatcctgccaacagttaagctattttaatccagggggttttcatctaaagccatacagaactgttggggcagattcctgtgttcacctctgtatgtgttacgatatatatattggttttcacacttgatatgttgtaggtctgtctgttgtctaatccaaccaacactctctggacactcagaaaaattaagattatctgcaactcacagcaaatggagtcctcaaaaagactaaccatgttacgtcagtgcccactctcgattattttgaaagacttggaatgccccaaacctcactggaccattctgctacatacttttctcacctccagcaagggttattccagactgaggaacctaggctcgggcaaatacgctactaggagtgtgccccaagtagcaccttgcagggggaggagacctagcgttgaaatgagataaactcctgggttacatacagaacacatgctgaaaaagtgacagtactattttttttctactcttcttctccaatttttggataatgataaacttttataatcttccttaggtcaggttttctggaaaacagtcccagaggcaaatgtttgtgaacagggggtttgctggggagtgtcctggggagtgacacctgtgacagggaaaagaaagcagggctgacaggcaaaaaaagcaaaaatagacaagtgggactacctcaaactaaaaagcttgcaaagctaaagacacagccaccactaccggtctctgcatcttgatggtagtggtcccctgggcccagctgctttctctttatctcttggtcttgtgtcttttacaatctcttgtctctgcacacagggagaacacccactaagccctgtagggctgtatagaaatgctactgatttttgtatgttgatgctgtatcctgcatatttactgaattcattgattggttctaagagtttatttgcagagtctaaaggttcttctgtagatataattatgttatctgcaaagagggataattagacttcttttccaatttgaaaggcttttatttctttctctttcctaattgctctatgacttctaatattaagttgaataagagcagtgagagttggcatgcttttcttgttccagttcagtatgatgttagctgtgggtttgtctatatggcctttattgggttgagatacttttcttctatacctactttattgagagtccttatcatgaagggatattgaattttaccaaatgatttttctgcatctattgagataatcatatggactttttgtccttcattctgttgatgtgatgtatcacatttatttaaaacattcataaatgatttatatatgttgaaacacattcttcatccctggaataaatcctacttgattatagtgtattatctttttaatgtcttgttgggttcagtttgctagtattttattgaggatttttgtatctatgttcataaggaatattggcctgtagttttttggtgtgtgtgtgcatgtgtgtgtccacgtgcccttatttagttttggtatcagggtaatgttggactcatagaatgagtttgggagaattttctcctttctcctccttaattttttggaatagtttaaagaagaactgatgttaactcttctttaaaagtttggtagaactcagcagtgaagtcttccattcctgggattttgttgttgttgttaggaagctttttattactgattcagtctcattactcattattgaactgctcatggtttctaaatttttttctggttcaatctttataggttatacatttctaagaatttatcagtttcctctaggttttccaatttgttagcttatagttgctcataatagtatctaagaatcctttgtatttctgtgtcaccagtggtaatgtctgctttttcatttctgattttatttgagtcttctctctttttttccctaggtggtctagtttatggtttgccagttttgtgtatcttttcagaaatccaactttttgttttgttgatcttttgtaatttttagtctctctcttgtgtatttctgctctgatctttattatttctttctttctactaattttgggtttggcttgtttgtgcttttccagttccttgagatgcatcattaggttgtttatttgaaacctttctagttttttaatgtagacatttattgctataaactcgcctcttaatactgcttttgctgggtctcataggttttggtatgttgtgtttatatttttgattatttcaaggaattttgaaattgtattcttaatttctttcttcacccattatcattcaggtgcatgttgtttaatttccatgtatttgtatacttttaaatgttcctattgttattgctttctagttttattccattatggtcagataaaatacttggtatgattttgatttgttaaaattcttgagacttgttttgtaccctatggctaacttttgacattgttacttgtgctgatggaatacgtattctgcagttatttggtgaaatgtgctgtaaatgtctgttaggtctgcttagtctatgatgcagtttatatctgatatttctttgttgattttctgttaaaataatctttccaatgctgacagtagggtgttgaagtccctaactattattgtattggggtctatatattccttaatatctaataatatttactttatatatctggacgctccactgttgagtgcatacatatttacaattgttatattcttttactaaattagtccctttataattatataatgctattccttgtctcttttttccagtttctaatttgaagtctgttttgtctgatataaatatagctactcctgcttgcttttgatttgttttcatggaatatttttccttctctttactttcaccctatgtatgtctttacaggtgaggttagttttcactatatagttgggtcttgttttttaatccttttagccagtctatatttttaaaatggggaatttaatctgtttatattcagggttattactgacaggtgagtacttactcctatcatttgattgattgtttcctggttgtttttgtatatcctttgctctttacttcccttcttattgtttatttttgtggttgggtggttttctgtaataataaggtttgattcctttctctttcttccttgtgttttggttctatcagtgagttttatagtttcaaatgctttcatgatggtgtcaattcatggtgcaccatgggactgaaatttaagttttataatgaatgcttttttccttaattcctgcttttatgtcttcatgactgtgtaaaaacttcattagttgatggattcaaaagactaacttgaagtcattttggaatgtgaatctgggccagataaaccttcatgtcctctctacactattctaaaaatggatgttcctcctgcttgcttggtagctaaaaacatatctgacttcagcaatagtaagaagtagatttattaatgcacacagaagaattgggacctgatgtgggaggcagagagatgatgagggaaagctctctggagtagctgctctatttaccaacaccgacctttctttctagcacaaacttggggctacctccacacgttgagtgttttccctgtgtaaatctgctgttttcttctaactctgaattggcatgtcctcactgagtttcagtccaaatttacaaaaacaaaatccctcccaactgatttaatatgcctgcactcatattttcaagtgcctgcactcatatttaaagtgtctgtactttaaatatttaaagtgtctgcactcatattttcaagatgtttgtttgcaaccccacacactgacctttctgtttccaaactaatttgatatgcactgcaattctgtgataccgaaacatgagaaggatattacatgaaaggaaaacaattttccagccttgctataaacataaaggcaaaaatcctaaacaaaactttacacagggaatttggtcatatataaaaatgatgaaacatcatacacaagtaaggttttatgtcaacaatttatgattggtgtaacatttaaaagtaaatcaatgggatacttctcattaatggagtacaggggaaaatgttatgattatcttcgtattggctatagaatgtgtgaaagagtcacttatctcttcatgataaatgagaaaataatgacagaacattagaagttcacttatttgatggcaagcctatacaaaaaccatacagcagagggaactactttcacaacggtggagtaaaatctgctccttcataaaaggagggagaataagtttaagaatccattattcaaaattcttaggaccagaaatttttcaaattttggatattttcacattttgtaatctttgcatataaataatgagatatcttagggatgagaggcaagtgtaaacattatctgtgtttcacatataccttatacacataggctgaaggtaattttatgcaatatttttaccggtttcctgcatgaaacaaagtttgtatacactgaaacatcagaaagaaagttgtccctatctcagccgcccatgtggacaatctgtgattgtttagtatcaccattgtatctgactcgaatttatatgctaccaataagcaatcattttattacacttattcacccataaatatttaacaataaaaatacgacataccattaatactgtgaaaataatgtgttcagggtaactaagcagcacagtagcatcaccaaaatacctgccccagctgttaaacaacagcaagaagcaacagcagcaggatttcagtctccatctacgatgctgtgttttgattaaacgattattggtcactgtattttatttttgtaggtgaaaagagacatcacaagcaattgagggaccaggaagtggatcctctagagatgaggaggcattctgctggatgacttttaaaaatgttttctccagagtcatctctctcattaacaatgttttttgtcttagaaatttcttgttgatttttaaacttacatgatttcttgttttggtatgaatacaggctgcttcagtccttcaataagcccatcacactttttcaccatgtcatctatcagcactttttctgcagtgttacgaacatcagcttcatcactgtcagcctgcgttttgcctgcaacccatcaaatgaggtcaggagaggagttttccacttttggcttcatgttggtgctcaaaacttttaggattttggagcatttcagatttcagatttctgggtagagatgctcaacctgtactcacatatattttcaatatcaactttttttccccagaattttggaattcagccaaaggtttgtcacaatccaaggagtggcatcattaagaatcatcaagaaaaacaagaaaactttagcaagaacagaaagtttagtggcagtataacttttccattcccatctttgtgcccagctgtgtggtagcctgaaagccaccaggtttgctccacagtggctgtgaaaaccagcagcccagcagcccctgcacgggaggatttcctttctgctttcgaaagctctgtccccggaaaactgtcactatttcatttgtatgtcagctctctaaaaaggcacccttttcatagcatgtatttacctcgtctaactcagagtgtgctctatgtggacagtgctatttctggggcaattttttgccatcacagctacttccgacggtgaggccaattggagctaacaagaggctgaccaaaaaacaaaaaaggaaaaggtaggaaagatttccaggtgcttaaagaaaatctctgtcacatctgtgggactttagaataccacactcctgcacagaattgtgtgtttgccccagggctgtgtacatgctaaggaaagacctcagatgaccctaattgttcacctctggctgaattaaagtctctatgtgaacaggaggtgaaatacaacataaagttgcaagtttcccagtggaatgttgacagtgtatctcaatggatacacatgcagccccttggaaaagtccaggtgatttattggtttagtatttaagatcatttctgtccaatcatgagctgacctctaagctaatggaacagcgtctttagtggctacacatgacacacgatacagactttagcaaattagtccaggaaagttactaaggaagtaatcaacagcaaagactgtgcaaacaaaccctggggagagaatctgatttccaaactggccacattatattatgtaaaaagtccaatttcattaaagaattacgagacatgcaaagaaacaaaaaatattgcccatacagagaagggaagggaaacaatgaacagagatgatcctttaggagctcagatgatggattagtagacaaagacatcagctattataaatacactgaaataactaaaggaaactctggacaaaagactaaaggaatgtatgagaataatgtcttacaacatagaaagaattaaagataagtaatgaagttgtaaagtacaaccaatgaaatagaaattcaaaacaggggttcaccagaagacagaaacagaagaaaggatcggctaacttaattacaggtcatttgagattatacactctaaggaacaataaagaaaataattaagaaaaatgaacagagcctcagagacctgaagaacacaatctagtgtaaaaacatatgcataatgggaatctcaggagagagaagaaagagaaaggcgcagaaagaatatatgaagatagaatgacgacgaaaatttttattttgattaaaaacattaatctctacatctaagaagctcaaagaacactaagtaggaaaatctctaagagatccacacctagatcgaaatattagtgacaaaggcaaggagaaaattttgaaagcaagggacaagccacttatcatgagcagttaataaactaaacagtaatttttcattaaaatcatgaaagccagaaggtagtgagagaacacattaaaaacggcagaagaaaaacctatcaaccaaggattctatatcttggtatgtctattcttcagaagtcagggaaaaattaaggcattcctggatatacaaaaactgaagagttcatcaccatcaacctgactgcaagaaatactgacatgatgatatatatatatacacgcatatatatgtatatatatatacacgcatatatatgtatatatatatacacgcatatatatgtatatatatatatacacgcatatatatgtatatatatacacgcatatatgtacatgtatatatatatatatacacacatacatacacagaaaatccttaagaatccctcaaaatattattagagctaataaatgacctcagcaaggttcaggacataatgtcaaaatacaacactctatggttttaagaataaaatttcatttacaatagcataaaaagaataggataattagggattcatttaaccaaaaaatggagaaacttttatactgaaaatggaaaattatttttcaaggaaataaaagaagacccccaaaatagaaagctatactgtgttcatggattggaaaactcgatgttgccaagctggtaattcttcacaaattgatctataaattcaatgcaatccctagaaaacttcaggtgaatttttgttgaaatagatcagtgaatcccaaaatttgtatacaaatgcaagggacccagaatagccaaaacagtcttaaaaaaaaagggcagaattggaggactcacatttttttatttcaacgtgtactacaaatctacaatttcaagatgttgtgttactagcataaggataaacacaatatatcaaaggaatagaattgagaatccataaataagccattacattttaaattgtcttattttcaacaaaggtacaaaaactatccagtggggatagagtagtcttttcaacaaataatggggaaaaactggatatgcacctgcaaaaaaatatacatggactgttacatcatatcaagtacaaaaatgggctccaaataaaacaagacctaaatatatgaactaaaattacaaaactctttgaggaaaacataaatgtatatcttcatgatctggtaatcagcatcaatttcttagatatgctaccaaaagcacaagcaacaaaaggaataatagatccaaaaatagattaaagttaaaaactttggtgagtcaaagggcactaataagaaatgaaaagataacccacagacatgggagaaaatatttgcaaattttatatctgataagggcctagtattcaaaatacaaaaagaactcctaaaatcaaccataaaagacaaaaaccatgattaaaaactgggcatcagattttaacagacatttctccaaaagaaaatgtacaaatggccaataagcatgtaaaatgatgggtgatatcattagacctcaggaaaatgcaaatcagaaccacaacgagaagccacttcacatgtactatgatagctataatcttaaaaaaaaaaaacctaaaataacaagtgttagtgaggatgtggagaatctggaacattcatacattgctggtgggaacataaaatggtacatcctctgtggaaaacagtctggcagttccttgaagagttaaacatagagttatcatgtgactcatcagttccactttaagaattatactcaaggtaattgaaaacattttaacacaaaatttgcacataaatgttcatagtaggattaataatagtacatacaaactagaaacatccaaatgttcaccaatggataaatggataaacaaaatgtgatgtatccattcagtgaaatattattcatacataaaaagtaaaaaaaaaaaaaagatcccaccctacaacatggatgagctttgaaaacataattctgcatgaaagaagtcagatgcaatgagccacatattatatactttaattaatataaagtgtccagaataagtcaattcataaaaagcaggttagtggttgccaagggagaagtaaaggtaggaggaaggattgagtgccatcaggtataggggttcttcatgggagtaatgaagttgttccggaattaacaagtggtgagggttgcacaagcttatcaaaatactgaaaaccactatattgtacaccttaaaaggtgcatgtcatggtttgtaaattgtatctcaataagaaagtagcacaaataattaactgaataactaaacaaatataagttaaacacacttgctttgattcctggactgggagactagattaccacttctgattctgtaagtgaagtttgttggcatacaaccacatccattggtaagaatgatctttgactgcctttgtcctatagtggtacagacaaggagttgcaataaagatcttaaggcatataaaacctacaatattcatttcctggctctttgctgaagtttgttgactcctatgttaaagcaatcaaatttttaatgaaaaacctttccaaaaagtacactgctggtccaggtggcttcacaggtaaatgctattaaacatctacaaattatacattctacaaaaatgttttaagacaagagaagcagagaaaacact

SEQ ID NO: 1220 - DNA, 594 bp, Homo sapiens
gtcactcctgccttcaccatgaagtccagcggcctcttccccttcctggtgctgcttgccctgggaactctggcaccttgggctgtggaaggctctggaaagtccttcaaagctggagtctgtcctcctaagaaatctgcccagtgccttagatacaagaaacctgagtgccagagtgactggcagtgtccagggaagaagagatgttgtcctgacacttgtggcatcaaatgcctggatcctgttgacaccccaaacccaacaaggaggaagcctgggaagtgcccagtgacttatggccaatgtttgatgcttaacccccccaatttctgtgagatggatggccagtgcaagcgtgacttgaagtgttgcatgggcatgtgtgggaaatcctgcgtttcccctgtgaaagcttgattcctgccatatggaggaggctctggagtcctgctctgtgtggtccaggtcctttccaccctgagacttggctccaccactgatatcctcctttggggaaaggcttggcacacagcaggctttcaagaagtgccagttgatcaatgaataaataaacgagcctatttctctttgcac

SEQ ID NO: 1221 - protein, 132 aa, Homo sapiens
MKSSGLFPFLVLLALGTLAPWAVEGSGKSFKAGVCPPKKSAQCLRYKKPECQSDWQCPGKKRCCPDTCGIKCLDPVDTPNPTRRKPGKCPVTYGQCLMLNPPNFCEMDGQCKRDLKCCMGMCGKSCVSPVKA

SEQ ID NO: 1222 - DNA, 27125 bp, Mus musculus
  misc_feature (1)...(27125): n = A,T,C or G
ccacaggcagctctcactgagattctcagatcacgtccactccccctcttaaacacacatatccttccctatgacctattccttctccattttcattaaagaacctacagttacagagacacctccaagatccaaaccaagaagactcgtggaagcagcatcttatctttgcacatggcaggcagcatcctcgtgggctatggggtctacatctgcttctcctgatactctgtcgtcagctccaaaacctgcatgagttcagtgggattcagtgctgagaatcagcaatggctattttcagttgcacaaaagagacagtcctctcgtaggaacaaagtaaccaccacagaaacccaagcttgcatcaccagccacagcactgtgtcttgacagatcatagagctcactcctcactccatcatcaaagttatcattcccatatatagccaccatagcatcataacctccgtagatccggagcacagaccacctgcacctagctccatggtagccctatcctcttgctgttggtctatgatatggtcccagcggctgcctcagcaatgttataagtgaatcacagaaccctctgtgctttccctgcaacttctgaaggtctctatccagctttagatagttcaaccaggaggcaactgccccatctttagcatcaaattgagcatgacatttcagaacccagtgcacaccaatactgttggtttaaatgcttcatagtgatagtaactccaaccatgtgttcagagaacgtgatttgagaagggaaagccctccaccacctccggtgtgcacaactgctcttccagccacctctacatgaggaattgctaagctacacacagagccactatcagtcttgactggctcagaaacgaacttcccttctgtgtgccttagttcctgtgaaccagtcagtgaggttttctattgctttgttcctctgactcttcacggggattaatctctctggtttttcttttctttttctgggcaggaatgtgtggggagcgggtgtggcggcagtcccaaaggcgccagggactgcagctaagtcatatgacttgcacctgacttcctcatataagacacaaacatcttgagtgctgcgcaggtgtaccaggatacaggtgaatccaatttggtggagatttgcccctgctgccctgattagctgaagcctcgtgactggcgagggggcatggcctgcagtgcgtggatgagagagagtataaaaggagtgagaggcccagggttcgggggagatatataaacaagggagatataaaaacaagggagatataaacaggggagatataaacaagggagatatatggagaaagaagaaacaggactgaataaatgtgtgcagaaggatcctgtagcagcgtcgttcttcctggcctgttgagtgcgcgcaacaggaatgcttccactttcatcagctctgccttgttttgctctgtgttgttttgttttgtttgaggcaagtgtcatgatgtagcccaggctggctgaacttgagatcctcctgcctcagccttcccaaggttggaccaccacatcaggctcttcatctcccttctgtgtctgagctccccctgctctgttcagcagaactcttctattccatgaatgaaatacttcccaactccggaatgaaaaacaaaggcaagactcacaagctaagctgttgcagttttgtcttttgtccagatactatcacatctgttgggaatagaaaggaaagtaaggcgagctgagttcttgggacctgcagtgtatgctgtggtacagcagcacatgaactgcaccagctacacaccaacgaggagacataacagatattattagctaaatcaaggccaaaaatcttacttccatctggatgcagcagtgtttcacactgagtattagagcagaggaaaaacagacactctgtctccctcctttgtgtctctgcagatcatcgctgtccaaaatgttaactaacaccattaacctgggcctcaaaacttgtttactttgatttatttttttaaaaaagttgttttaaaaggcttttaataggtactctaaaagcattttccccaaaaggctgtatttgcataatattctcccatcttcaagcatccgtctcatcatacttgtattttaagagagcagctacactatgctgagttcaaaccccacctcttacactgcctcaggttaaacttagctctctaaagccgtttcctggcctgtaaaacagtgacagcaatgacgtctggcatatagggtttatgaggactggacaaaatgataatgaacaactgtctgtaacagtccctggcaacaacatgaacacaataaacattagcagctgtcaccagcaagcagcaatgccactcctccctgagtcaccctagctagaatatttggggtgaaaaatcccctaaacacaagtggaaaaagtaccaagattccctggaggacaacaccactcaaggactgaagactctcaactatcctattgacacagaagaccctagcattaagaaacaataacctaactgggcagtggaggctcacacccttaatcccagcactcaggagacagaggctagagaatgtctgtgttcaaggccagcctgatctacaaagagagttccaggacagccagggctacacagagaaagcctattttgagaagccaaaccaatcatacaaacaaaataacagactattggtttctcctggagtaaactgtcctctggaaggcattttctgcattctatatactaacaatgatatattttctttattattcaaaaagtaacagttattgttttttatttggtttggtttggtttggtttggtttggtttggtttggttttaaggggaaatagtgccaatttagaaggcatgctttttcagaaagtcatgggctcagtgtgaagagtcttacagttcacccactcagctcagcaccggagacatccatctgtccttagctcagcaaagagatctgagttatgaggcttttatttaaaaagtttctaatcagtttgctcaagaaaaaaagcatgaatttggaagtcttcatggaactttgtatacaactcagtgactttttgtttgccatatccccaaatcttggttcagatgataatggcttctggtagaatttgtagaatccatttttgtagatttgtagaagctatttgtcagatggctgccccgaaaccattgcagcaaattagtttagccctatttaaatacaagatagatcattttctattgcattacaagaatgtattgcttacactctttatagagctatatatttttttggatgtgggaatattacaatctagtttctagaggaaaaccactcaaagctgttcctacctgttacgtaaaggatgctgttagcaggggtaatacacagaatgtggtctcagatccttggagttctttgacatgagttaagttcctgtccttactagggcatctctcaagctgtgaaaacaccagaggaaatgagattgtgggatgtcagaaaggtctccctcctgcagccgcttctctgaaaaccaactagatacaaagctttgctctgacactaaaggaaacatttagaacagaaagctagtccgactcttccttctgaaatgccaattggccctgtgttttcctggtctattttccttctcctttctttgaaatcaatgggctcagtccctgtaaatttcccaagcaatgggtcgtgtagtaaacagaggtgtgtaactacaaagtgcaggttcagaccagcttcctggaaaagatggattagcgagtcactaccatctagaactgcctaaagagagctacagcttcttccacagcgcatggaagaacccagctcagcccagaaagcaccagaaagactttgccctcaactacctcctcaccctggactacgaaaccacaacactcattttctttaaaagaatttttttttattttgtaattaaaatataattacactgtttccccacctccccttcccttcctccctccaaacttcccgatgtctcaccctgccctcactctcagactcatggtcattttttctttaagtggtactagtacatctatatgcataagcatgaacccaacttgctgagtccattttctgttgcttgtatgtgtatacgttcagggatgacaggttcctattggataactgatttaaaggctcatccctggacaggattatttctccttgcaacctgtagctctttctttaggggtagggttctataagatttttcccctccactattttttaaaattatgtgtttatatatgcatgtcggtgtgaggatatgtgcacaaggatgcaggtgccctcagagtccagaagacagtctctatcccctgaggatggagttgtcccttcccagtccagggaacccattgggaccagtactcaattctagagggcagcaccagctcttacccactgagccatctctctggttccattatgtctcattttcacaaatattttcagcagtaacacaagaaaagccacagagacaaatgataaaacacaactttagacttccattcacttgcaaatccaaatggtttacagtaaacatccacgtacctagttacttacagaacttaaaggtgtgaaaaggaagatttcaccacacagattcaaccctcagcgactgctgctcacactagctaaggcgacaccccgtgcctcggtttccttgtttgtaaaaatgagaactgtatcagttacttttgtaaaacagtgaccaaaatatctgacagaagggacttaagggaggaagattttactttggccaacggctgtggaatattcagcccttggtcagtggctctgcttctaggcccactgtcaggcaggttaccatggtgacaggattaggtgactcaggagtatcttaatttgtccacagacagaaagtttaaaaaaggacagaaatgcccggcatggtggtgcatgcctttaatcccagggaggcagaggcaggcagatttctgagttcaaggccagcctggtctacaaagtgagttccaggacagccagggctacacagagaaaccctatcttgaaaaacaaacaacaacaacaacagaaattaaaaaaaaaaaagagccagatgacatataacatactccacaccatccaaacccccactgccaatgacatacttcctctgattatgtgccttctcccctgtgctacctcccaacaatgctatcatattatgtactcaacaagggatcatcagtccattgattaatccatgacccacttgtctctgaaacatcattacagacacattcaaaggtgggttgcactaaccccctagctatttcttaatccaatcaggcagacaattaaaactagtcgtctcagggataataataacagtattggtttacatcattattatctccatccatcagagctgtctagtaccaagagtattgggaatggtatactatttttttaaaaaaagaacataggcaaagctttagttttggaactttgatcacattccacattcaagcttgatcctgggttgggagtatctcagtgggcgtaggcttgcaaagccctggggcccatcccccacatctccccagacatttcccgttttagattgtatagcaactattccataaaaacaactagaagaatcttttttcttttctttctttctttctttctttctttctttctttctttctttctcctcttctttatgttttttttaacatttcttctattccaaatgcattaataagctgtctgtgcagccagggccttgagaagccaagatctttgaaagctggagaactcccaggaaacgcccctactgctggcactctccgctcaggcacttgccagttcataagcacagtgggtatggatcgaaaactgagacgctgggcagaaaatggctgttagcaggaaagagactctggcttgaggaggctcaaaaaaaagctgaaattcagatacaccaagttaaccagggcttcagacaaaatcctgaagggagagtgtaaaacggagattcttgtatgggcagagatgctcttggctcctgtgtctttcctcattcataagcagagcagggcaggtgtgaaacagacagaataaaaagcagttgaggaattatgcagaggtgatcatggtcttatggagatgaacaaataaacgctggggttcagagcccaccagagcagggaagccttgggaagctccttgtactttcagtagaaattcattctagaaatgagtacaaagacgtaaagactagcttttagaaatggaacctcaagccagcttgatccctcatggattctgggggtttctggttttggtctgactgctgacacccctgaacacaaactgtgtgtgtgtgtgtgtgtgtgtgtgtgtgtgtgtgtgtgtgtgtgtgtgtgagagagagagagagagagagagagacagagacagagacagagacagagagacagagagacagagagagaaacagagaaacagagacagagagagacagacagacacagagagatgtctacaagtcaatagaaaattaccagctatagagagacaggttcaagagcaaaatgtacattcagatcatacacaagtaatctagacattggaataatcagactcagaacataatgactgtcaacatggtaaggagaatggatacaagatgggggatgcctcaaggacctaaagtctacatagttttaaaatctaagtagaaattctagtaccaaaaaataaaaccacaagcagacagtaactaaaaaggcaacattcaataacagaacctagcaattgttgagacataagtgaagaaagtcagagtgacctagaacagtgaactggtagaaaacaggcaggtggaaacacctgaccccagttcttagaaagaaggaggaaattccaaaagagcatcatcaatcatgtagaaggtttcaagaggctgtctatgtgtctgattggaatccaaggaggttgtcgatggaaacctgagatgagctcaggttggaaactataggcattatttggagagctaattcacagctaagaactttccaaagctgatttaatcaggctatggattcctggtgagaaagctcaacctggaactccaggtgaccacctcaacttccccagtttctcctggacgcttgaaaggccctgctctctcggtcaggctactgcagtcgtctctgctggacattatgagttcatgagttgatgatgtattcctatcttcttcctgtttctactgccacttgatgtttatttttatttatttatttatttatttattgtactttcactcgctttaaacttaataaactcacccactcaaaactgaaactatggctgtcataagtaaccctctcaaccgttgaaatcagccctcagcaccacacaggaggctgcctgcactaagcaaatgccccgccaatgggccatatcaccagatttctttaaaaaaaaaagttttaagacaagctctcatgtcattgctcaggatggcctgccaccctgcagccaggcaggccttgaacttgtgcctcagccataaacatagctgggattacaggctgtactcatcactggctcagcatctaccaaattatgttaaaatgatggtcttgtcttttcgtttccagcactaaaatctctcattcgtttttctttcctatagcattgacctctatctctaatacagtactaaatactgttagggctaataggcaaacaaacaaacaaaatacaaaacaaaaaatcagaaataaacaaacaaacttaaagaaaagtaacattacagaggaaagtaaaaccatcaggaaatgtttggcaaacgtatacagagagcaagtacgcgtgagtcctcccgctcacccatggagtgctcacccaggaacgaaacatctgtatcccagcctccactgcaaggtttatagaccatgaggaagagggcatggaaacggtgtaaagggcagaggtcagggaggactgcggagaaatactgtttctctggaatacagcaacagtgcacttgccaacccaaggcagctgtcctaggagtcaggttttcaggttcacccaggcaagattccaacatggagcatgacatttcaggacttcttcaggagggacattcaggctttttttggggggtggggggtggggggtggggggagtttggtggccctggttagttgactctgctcctgatttatgagtgtttaaacaggacaaattaaactcatgacagaagtgagggaaggatcgttggagaaggcctgagggacaaatatgatcaaaatacattgtagcttgtgtgaattctacaagaatttttttaaagttgtattttaaatgcatgggttagggactgtgtctggtggccaagaatgtacactgaacagaggctctggactcacctggatggcaggaactacctttttgtaagagtttgccctctaggaaaggaacagctcccttaaatgagcttcattgtaacctcctgggcaagcacagctctacataaactattacgacatcagtaattctaatcatccattgtcccttgtccccagttcacagccacagggacctcactgatcagagctgctatggtgtccttcttattggcttggcttcgcccttttcaacagaggtccaccctgctgagtaagtgctcactgatctcttctgtccaggctttagtggacttcagaaggaagaggcaccggctcttctctcccgtgctcccaaaggcttgtggttatggagatggttgcctcaataggaggtgggctctgacagctggatgggtctgggggaagccagacacatggcaggctccaagtcaatgaccaagcagggcctcctctctctgcacacccagtgaggctgtcttggggtagaaaggagttaagttccaaggaatctcctaccccaaacctccaaattacagcttgtcattgcaagcttcgaactctcacactttctttgcaggagctgggactacgctcaatcagcctggggagttatcaggtgttagcctgttaccccactgggaatcccttcagccacctttgttctccatcttgaatggagccatgggttggccatatcctgccacctactcccttggatctgagctggacccttgcatctggcgtctacactgctgctgaaatcttctcaccgtgcacatccaaggatatctctatggtaaaagtccagaaaggctaaagatgttgtccacaatctctcggcaatgaccagatatatccccaccagtatcacaacttgcaacgcgctccgttcccatctgccctctgcctccctactgtgttgattcccatttccaaaactagctcagaatgcatcccactggcagccaggcaatgccttcttgcagatctggaggcttcaggagcctttgctgcctcttaggctcctgcagagagatggccttgctctctctgggcccttttcccccaagatgctgtgcagtcgtctcactaaatcaaaactgccagaactgagttttaagcgatatatagccaccacatctattttgttcctttatactttcaaagtaggacagattcgcaaaatacattgagtcagactcagtgtccacgatggagagacgagtgggtagcttgtgcttctttagaaggggcactgggcagcgtgttagggctagggggtagtggggcaggacagacctgtcccgggacaagagtggctactcgcaggccggttttgctttcgctctgagtgtggtgggcggtgggacggtcccgaatctcctcaaacgggcactccgagagttaattcgaaagcgccaccagccttgggggcgatcgacgcacttgtccttgagatgtagagacagagagagaaagcaagagacacagtcctgggaaagtcctgccggctatccagacaattataaaaatgtgtctcccaaggtcagcgttccaacagcctcaccctcggcatccagcagctcctctcagtgccggtccagcatgtgtcaatcacgctgtaagtacctgagggccgggaccagggtgacttgatgagaggagaaggcttgagaaagaacagacagaagccctggacccattaagggagactaaagggctgccagcaactgcaggccaagggaaggaagaggggaaagatggtcgtgctagattgcgctgcaccgagcatggtctcattatagaacaaccctgggggctacggctatgcccgtttcacagaagagaactaaagcccagccttgaaaccaatgtaaggaaaatgcaggtctcaggcagtccccaaacaagatctgggaggtcttgcttcatctgtcagccccggggaagggcttaaattatgtgtggagggaggtcagtacccagaatggatggaaaaaattgccagaatggctgaagaaagaggcaggtcaaaaccaagttgacaagctccacctgccctttgtttcccttccagacctcctctttttggccacccttgccctcctaaaccacctcagtttggccagggtcattccagtctctggacctgccaggtgtcttagccagtcccgaaacctgctgaagaccacagatgacatggtgaagacggtgagtttctcctgtccttctggcttcaaagttccgctgttgacatgacttctaacctatctggtatctgctgggaagtttatggtatctggcaggaaccgtagagggtttcaagacttctaaatataatctaaaggaaactgtgtctctagagaaaggaagaatggtaataaattgtaacggcatcggtttaggctgtgtctacacagaggaaagtggggacttgcaatgtccctcccagcctgcctgcctgtgtgacacagtgtcaggtgctccctgcttctgcttcagggcaggtggaacagggagacagtctctaggtacactctctgtgcttcacaagccatagagatgaattagattgtctctccccctgctcaccagtgtccagcactgtgatgcagtcccttgtcggatggacacatgtcagggaggactcagacatcagatagcaagcaggtccagcctccagttttctggggcaagtgtgatccagttttagtcacggctccactcatttttctcaggtttcatgtttgaatgcaaaatagccttttccgttgtaaaattgccacggtttcctctcgctttggggacaaagctacagcaaaatgctaatgtgtttgagatatcctgcagctgctagggctggagatccagtagaattctggcttaattatgaatgggtctcccgggttctatcccccaacagagcgtgcgttcataagcacctgggaacagaggagggaaggagggaaactctgtcttcctgttttgtttttaaatctttcttgaggatcttctagcttgttgtcttatggctatcccaacataagctccgctccacaagcccttcttggtgaattttctttctttccttcccgtcttgcataacgtgctgctggctgttcctccaagctcagtcttaattgagtggggttcccaggagggagagatggctctgtggttaagagagctggctgctcttccagaggtccagagtttccacaccctcatggtggctcacaatcatggtaactctgatcatagggaacctgtcgttttctctgtgcctctgtgggcactgagcacatgccacacagacatccatgcaggcagaacactcttggccatgaaaccttaaaatgaaggagaaaccttacgagaggttccctaaggaatccctgcagaagggagagattgttttcctaagatgaggtttggtgtggaggggatgaggtattcaaagttaactagccgctcctcactcctctgctgccaaataccagcactgggcttcgagacacaatagaattcgaccttgttttcgtttgggtcactattgctctctagttgaacacggaatccacgggggcacattgctgtctgtcctttgtcacaccccaggaccacagctgcatggaaaagtcatcgcaggcttcagtcagagagctgttgacttcctaatatgttgtgtaattctgttcagtggtgctttccagcacaccagggaataagagacagtccccgcgtatgtaaattaaagctcaactagtatttagggcttgcaagtttgttacagccatcaagctgtgactttaacagtttcctctttagaagttaaacttgaaaaaaaatagagggagagagagattcacagggcacagctgcttggaaaaaggaaaagccacaggactcaccagaagcaagcagcacagtgtggcactgatgctgatgagtacagcctgctgcaccccagtgttcacatggtgaaaaaaataccctgctggcggacagcctaggcaaagggggaggagagtagggagagcgtgcgggaggttgggtttcttagcttatgaagagcctgagtttcctacaggccaaagagatgacggttcagagtggccagcctaggctctgctgatccactgcgatgcaggtctcagagggaaccagctgtcttgctgagagattcacctcagcttctccttatgtttttcccaggccagagaaaaactgaaacattattcctgcactgctgaagacatcgatcatgaagacatcacacgggaccaaaccagcacattgaagacctgtttaccactggaactacacaaggtatggaggacccccacccaaaaaacaacaacaacaacaacaaaaaacacaattaagagccgtgcagccaacctcagctgtctccagatacttacttgtagctatcaaacgtgagagttttgaagaaaaaaaaaaaagtcaacaaccatacaaatacttctacaagctgaaggatatactcggtaactaggaggtggctatggtggtatagacctttaattccagcacttgatggatagaggaaggccggctcctgttaagttagaggccagtcagggatacacagcaagatttcatctttaaaaagaaagggggtggtgtggcgggtgaagcttacttattgaagtgctcatgtcacaagcctggggacctaagttcccatccccagcacccatgtaggagctgggtgtgatggtttcacatgcagagacaggaggatacctgggccagctagtctagccgaatccatgagctgcaggcccagtgagagaacctgtatcagaaaacaagaaagtcaggagagcggctgagaaagaccccaaagatcatcctccgatttccacgagtacatgcacctgcacacacgtgcacacaggaatcctatacatagccacccaaaagcagttatgatggtgaagtttcttttactggaatgaaaagttagtttgagaaaaaaatatcagagagatttatattaagagtgaatgggtggggggtatgcatgcctttaatctcagcacttgataggcagaggcagatggatctctgtgagttcaaggccggcctggtctacagagtaagttccaggacagccagtgctacaatagaaacaggtgatggtgatgatggtgatgatggcggtgatgatgatgatgatgacgaagacaaactcctcggtttatgattttcttctagaacgagagttgcctggctactagagagacttcttccacaacagtaagtaagcactctaagggttccttccccatgacggattcataacactgatgcctggtcattctttctctagagagggagctgcctgcccccacagaagacgtctttgatgatggtaagccacatcacttttctgaaatgcagcagggtcctgtagttccagcccatctcaatgattccttgcccattgtgtcctgcgctctagaccctgtgccttggtagcatctatgaggacttgaagatgtaccagacagagttccaggccatcaacgcagcacttcagaatcacaaccatcagcagatcattctagacaagggcatgctggtggccatcgatgagctgatgcaggtaagccttcctcctatcagccagcgctccttttccatggtgaagagaggtcctttattagatatgataaaatcagcacagcttgggttgggagagacctgaacacccccaccccaccccacaccctcatcccccaaccatgaaaggccttgcaaggttacatttgcttagagagccttgagggggcctctacaataagggcaaatgcaagcagccttctacttgttgactcatgatacaaatcaggcacttttcaaatgcttcttctcataccatccccacaacaagcaaataaggtctctacagaggaggaaactgaagcttaagaggatgaacgagggttccctacaaaagggttttttgttgtttggtttggtttggtttggtttggtttggtttggtttttccgagacagggtttctctgtatagccctggctgtcctggaactcactttgtagatcaggctggcctcgaactcagaactccacctgcctctgcctcccaagtgctgggattaaaggtgtgcgccaccattgcccagcttattgttgttttaaatacattcttttcttaaaggttcaagattaggactggagagacagtccgatgattaagaggacttgagtttggcctggggctcctatgtaacaaacagggtgtggtcctgaactgctctctaactccagagagtggagacaggaggcctatggaggctttcttgctgcaagtttagccatgaaatctccaggttcagggagaaagcatgcctcaaagaaataagatggagagtcacgtgatctcttctctggcttctgcatggtgtaggcacagatatgcacatgtttgagtgcatacaatacaggcaaacatacacgtgtcctttttaaaatgtataggatggacattctaggggctgcacacatattcaaatattactaggggaagcacttggggctggtgtccaagtataatctattttgaaccaaaatgtgaccaaaatgaaaagtggtcttacatctaggtaattacagtgttaggtatccgtgggaactttgctgtaccaccagtaacacaaagcacaggagtgtgcacaccagagacaagcaccttggcaaccaaggcgtgggatgaacatatgttcagaagtcactgcctggaaagcaattgtttttcatttcatacatactgtcttgcacagggtttctatgtcttagataaaatatcatgacggaaagcaagttggggaggaaagggtttatttcatcttgtagagtgtagtgagtctattacccagggaagtggaggcagaagctgatgctggagaggactcctggtgactggagtgctccacatgacttgctcagtgtgctttgtatagcacccaggaccaccaggctagggtgagctggtgcctcccacatcaactgtcaatcaagaaaatcaccagaggcttgcccactggccaatctggctggaggtgtttttctcaatgaccacaggcttgtgtagagttaacataaaagcacccaggacattacatattgccagatgactcctttgaaagacagtgaagtttatgcaggtcaaacaacctatcatgtagagatttgtaatggatattgcatgaacaaggccagaagtcaggtgatttggatagtaggaagaggtctaccagggaccagccaactatgctgacagggttaactcttgtcagcctgtttgtaaaataagatgactttaaatagcctatgtctctcttgagatttttgtgaggagcaagcaaaaatcttaaacatcacagaaacctaagttcttattctatgttatgaaatcaaaggatcgagtggggaaacacggtactggcttgtttatctaccacaaatagcgtttctatcagagataggtctgttgttgataataagctctaatccatagatcctacttaccctccaactccctcctctaaaagaacaggacttcttaacataatttataaaaattaattagctattgctgcaggtgctacctcatagactcacaccttctgagagatcagctctaatgacaatttctttctggaaaatttaggggtcttgtcagagatcattaaaaacataggtatatgctcacaaaagagtatttcttccctcttttcctgcaggaacacagcaggagtagatgtgaaatgggtctaggagtgtgatgaggggctaggttgcaggccctggactttgcattgactgtctcccattttgcagacaaacattctaatttttaaattgtgcatatgctatgcttggtgtttctttctagtctctgaatcataatggcgagactctgcgccagaaacctcctgtgggagaagcagacccttacagagtgaaaatgaagctctgcatcctgcttcacgccttcagcacccgcgtcgtgaccatcaacagggtgatgggctatctgagctccgcctgaaaggctcaaggccctctgccacagcgccctcctcacacagataggaaacaaagaaagattcataagagtcaggtggtcttggcctggtgggccttaagctccttcaggaatctgttctcccatcacatctcatctccccaaaggtggcacagctacctcagcatggtcccctccatcgcttctctcatattcactatacaagttgtttgtaagttttcatcaaaatattgttaaggggcgaagacgtcctcccctcaatgtgttagcagaagagcaagaactgataagctattgtttttgtgccaaagtgtttatgaaaacactcagtcaccccttatttaaaaatatttattgctatattttatactcatgaaagtacatgagcctatttatatttatttattttctatttattataatatttcttatcagatgaatttgaaacattttgaaacataccttattttgtggttctaataaagtaatgttatcacttcacagatgttcttggagtctctatctatctatctatagattatttatttaattacttaaacaggacctcgctgtggagaccaggctggcttctgactaacagagatcagatgacctctgcctcctgaatgctggggccaaacctatttctcactttgcccagctaactagagtgtttaagtgctctgagacacactgcaagaaaactgtcttagtttgcactctattgcgctgataaacaaacaccatgaaactggggggaggggcatatgccatgttacagcttagagtctatcactgagggacatcgggcagaatcctggaggcaggacctgatccagagaggatggaggagtgctgcttactggcttgctctccatggcttgcttggctggctttcttatacaacccaggaccaccagactaggattggcactgtccacagtgtgctgggccctcctgcatcaatcattaatgaggaaaatgccccctcagacttgcctgcaggtaaatctgatgacattttttttttcagttgagcttctgtcttcctaggtgcccctagtttgtgtcaatttgacaccacaaacttaaaaacagcacaaaaaattctgatttgaacaaaataatcttgcaaagacggccacaatggggcttgggggatggctcagtgggcagtgttcatcttacaagtgtgacaagcagagttcaggtacccagaactcaacctgtaaccccagtgttcgtcaggcaaactggggactactggagcaagctggctgagttgagaggtcagactgatgacggtctgagagagagactgggcctcagtacacaggcagcaagagatcaagaaagacactcaacagcagccttgggcctccccgcccatgtgcacgctcatgcacacacctatgcatccacacatttgaacacattacacaagcatataccacagatagatacatgaaaaaaaaatggccaaagtgttctgactcatttcccaatccccttaatcttgtttttgcggggagaccaggctggcctcaatactcaagtggctgtgtgaattacagtttttaaggattacatgactatttctgttcaacatttgaatctcaaacaaaacataactgaaatctttctccctgacaacctcgggccatgacctgctgtgcattaaacaaatacattatcacactcttcattggaaaacgtgtcctgtgaggctctctaaattattccaattcgtgggaccctttgggctctcagagggaagccctttttaaattacaaacagaaaaactctctacttgcctaaattatatagaacgttttcccaaaccccatgtataattgctttcttttggtttaagaagtgtctttcttctggtcttagtattaattctgtcttcctagttctttaaaccacgcgaatctaaagagtcccacaacagaataccacatcatttggttctgggataaccatgttccttcctaatagaatagggctctcgggcctttatttagagaagcaccttttctaagctgtttcttcccaccaggtcccccattcatctccaggggtccagaggaaaataattgtggcctctcctctgtgacaaactcactgtccaattctcactctctacccatcatcagataagtcgctggagaccagattcaccaaagaactgggtaactgtaggcttttcccagtcaggggctcccctcaggcagggactctacccagtcaggggctcccctcaggtagggactcctcccagtcaggggctccccccaggtaggggctctcctcgggccagggcccgtctcaggaagggttattttttcctttgagcagctcagatcacagtgactctcataggctgtggagtcgctggctactccttctagagaatgacactcactgtctatctcatctttgagtcaagcccagcaagagaaggtctcctccacagacttgtgtccgtgtagaggaacacactcagtacatttgtcctaggcaccaatatgagatgtgctttaaataatgtctggaggtggacatggtagtacatgcctgtaatcctaacacttgagaggctacagcaggaaggctatgagttcaaagtcagcctaagctttaggccaagatcatatctcagacaaaacaaaagcaaacccaatgggcccaagtgaggtcttcaggacaaattccattcctcaatccatagttagttctcacatcttgctagatatatgcagcagtgttacgtactctgaccaagtgttttaatggctcccccacccctccgtgccctcttccaagaaatgaagataatactcaaacttgcctccaaggatcagagtgatggttaaataaaatgatttgcctggccctcagtacacagcacatcttagtaaattttcagggttatttcatctttggggatggcaactcagagtaattaaaccctctgcgattgcttcattggtgaaatttaagagagtaaaacaaaattcacagttactgtaaggattaaatgaggcatggatggagccaggtgtggaagcacatgcctggaaacccagcacttgggcagtagatgcagaagcatcacaagttcaaggctagcttttactacaagagtgtttgacaccagcctgggccaaaggagacctgtctcaaaagcacacatacagtaaagaaataagacactgcgggtacctaatgggcactccaaatcaaactgttaaagctctggggttatatctttgatacccatcactggtcccaccaggcagggccaataagatggcttagcagacaaaggcactggaccctccagggcactcagctagagtgtggtcagccgtaaaggttgcctgtggaaaattcaggcaaaaggcaaggcccctccctccaagaacaaagactgagggcctgaacttttcagaccaaatccctcagtttaaaccatgcccaggcacagcccatagagtccccttgacctaaatgctccgctaaaaaggaaacaagcctgaccgcctctgacacagagaaggatccacctgaggattggcatggaaaacatgggggtggaatctgcctactgaggttcctcagaactggggaaagaggcctggtcacatgtgcaaaggcagatttggaaaactcaagacatgccaaagggtcctctgtctccaaagggaaagtgaaattgcagaaacaaatggggaaaataggtttaatgtgagaccagccccatgtccactatagacacttttggctgtgtcaacaggcatttctattgtccctttactgtcaacatttctttccagctaccattgtgacttcataatttaacctaaggtacatataaaatttaaaatcaacaagtcctactacatcttctgaagattttaattgtctatacctgaaatgaatacatacatgcatgcatgcatgcattcacacgtgcgtgcgcgagcatacacacacatacacacacacacatacacacacacacacacacacacacacacacacacacacacacacactgtgtgtaatcacagttactaaggaggctgacaaaggtggatcacttgaccctgcagagaagtggagggaagcctgaccttggcaacaaagaatttgtctccattttttttcattaataattgttatcacatttgtttattgtgttgcacacatgcataggacacttgtgaaagtcagaggacaacttttaagagttggttctctccttccaccacataggttctggtggtccacctcaggctgtcagaagagcatccttccttacctgctgagccatctttctggccctcaaaaggttttgtaattaaatgtttaccaaaaaattcatttaaatgtatttggtgaaaaaaaatcttcagtggtatctatgtatccttacatttgacactaaaatatcgatgtagggaccaagtatatggtgcatacatatagtcagagcattaggctattgaggcaggaggattgaaagtttgaggacccagaacggggtatttagtaagactctacctcaaaataaaataaaaagaacagataataaaataaaaaatcaagtttcattagataccttggtgtgactctaaccaagcaagtgaaagatctctatgacaggaacttcaagtctctgaagaaagaaattgaagaagacctcagaagatggaaagatctctcatgctcatggattggatgaattaatatagtaaaaatggccatcctgctgaaagcaatctacagattcaatgcaatccccatcaaaattccaaatcaattcttcacatagttagaaagagcaattagcaaattcatttgggaaaacaaaaaaacctaggatagcaaaaactcttctcaacaataaaagaacctctggggaaccaccatgcctgacctcaagctgtgctgcagagcaactgtgatagaaactgtatggtgttggtacagaaacaggcaggaagatcaaaggaatagaactgaagacccagaaatgaacccacacacctatggtcacttgatatttgacaaaggagctaaaaccatccagtggggaaaaaaagatagcatttttaacaaatgatgctggttcaactggcgatcagcaagtagaaaaatgtaaatcgacccattcttatctccttgtacaaagctcaagtccatgtggatcaaggaactccacatagaaccagatacactgaaacttatagaggagaagtggggaagagcctcgaacacatgggcacaggagaaaacgtcccgaatagaacaccagtggcttataatctaagatcaagaattgacaaatgggacctcataaaatagcaaagcttctgtaaggcaaaggacactgtcaataggacaaaaaggcaaccaaaagattgggaaagatctttaccaaacctacgtctgatagagggctaatatccaatattacttatattaaggtatacaccttatctccatatttgctcctgttagcattttgttctccttctaagaaggaccaaagcacacacactttggtcttccttcttcttgagcttcatgtggtctgtaaattgtatcttggatatttggagctttggggctaatatccacttatcagtgagtgcataccatgtgtgttcttttgcgattgggtcacctcactcgggatgatattttctagttctatccatttgcctaagaacttcatgaattcattgtttttaatagctgagtagtactccattatgtaaatgcaccacattttctgtatctattcctctgttgaaggacatctgggttcttttcagcttccgactattatgaaagtaaaatgtctccatctgaaagagataagcatagtcagtccacagagagggtcagggaagacagaggagtgctgacgtggcagcaacaattagaaatgaagctaaggcatgtcctactcacgaagcatgacagtgccagcccttagaggtgagtgtgtgtgactctgtgtgtgtgtgtgtgtgtgtgtgtgtgtgtgtacatgtgtgtttgtgtgtgtgtctatgtttctgtgtgtgcatacctgtgtgtatgagagagagggtgtgtgtacgtgtgtgtatttgtatgtgtatgtgtgagtatgtgtgtatgtgtgtgtgtgtgtgcatacatgtgtgtgtgaaagagagggttgtgtatgtgtgtgtgtgtgtgtgtatgtgtgtgtgtgtgtgtgtgtgtgtgtgtgtgtgcacnnnnnnnnnnnnnnnnnnnnnnnnnnnnnnnnnnnnnnnnnnnnnnnnnnnnnnnnnnnnnnnnnnnnnnnnnnnnnnnnnnnnnnnnnnnnnnnnnnnnnnnnnnnnnnnnnnnnnnnnnnnnnnnnnnnnnnnnnnnnnnnnnnnnnnnnnnnnnnnnnnnnnnnnnnnnnnnnnnnnnnnnnnnnnnnnnnnnnnnnnnnnnnnnnnnnnnnnnnnnnnnnnnnnnnnnnnnnnnnnnnnnnnnnnnnnnnnnnnnnnnnnnnnnnnnnnnnnnnnnnnnnnnnnnnnnnnnnnnnnnnnnnnnnnnnnnnnnnnnnnnnnnnnnnnnnnnnnnnnnnnnnnnnnnnnnnnnnnnnnnnnnnnnnnnnnnnnnnnnnnnnnnnnnnnnnnnnnnnnnnnnnnnnnnnnnnnnnnnnnnnnnnnnnnnnnnnnnnnnnnnnnnnnnnnnnnnnnnnnnnnnnnnnnnnnnnnnnnnnnnnnnnnnnnnnnnnnnnnnnnnnnnnnnnnnnnnnnnnnnnnnnnnnnnnnnnnnnnnnnnnnnnnnnnnnnnnnnnnnnnnnnnnnnnnnnnnnnnnnnnnnnnnnnnnnnnnnnnnnnnnnnnnnnnnnnnnnnnnnnnnnnnnnnnnnnnnnnnnnnnnnnnnnnnnnnnnnnnnnnnnnnnnnnnnnnnnnnnnnnnnnnnnnnnnnnnnnnnnnnnnnnnnnnnnnnnnnnnnnnnnnnnnnnnnnnnnnnnnnnnnnnnnnnnnnnnnnnnnnnnnnnnnnnnnnnnnnnnnnnnnnnnnnnnnnnnnnnnnnnnnnnnnnnnnnnnnnnnnnnnnnnnnnnnnnnnnnnnnnnnnnnnnnnnnnnnnnnnnnnnnnnnnnnnnnnnnnnnnnnnnnnnnnnnnnnnnnnnnnnnnnnnnnnnnnnnnnnnnnnnnnnnnnnnnnnnnnnnnnnnnnnnnnnnnnnnnnnnnnnnnnnnnnnnnnnnnnnnnnnnnnnnnnnnnnnnnnnnnnnnnnnnnnnnnnnnnnnnnnnnnnnnnnnnnnnnnnnnnnnnnnnnnnnnnnnnnnnnnnnnnnnnnnnnnnnnnnnnnnnnnnnnnnnnnnnnnnnnnnnnnnnnnnnnnnnnnnnnnnnnnnnnnnnnnnnnnnnnnnnnnnnnnnnnnnnnnnnnnnnnnnnnnnnnnnnnnnnnnnnnnnnnnnnnnnnnnnnnnnnnnnnnnnnnnnnnnnnnnnnnnnnnnnnnnnnnnnnnnnnnnnnnnnnnnnnnnnnnnnnnnnnnnnnnnnnnnnnnnnnnnnnnnnnnnnnnnnnnnnnnnnnnnnnnnnnnnnnnnnnnnnnnnnnnnnnnnnnnnnnnnnnnnnnnnnnnnnnnnnnnnnnnnnnnnnnnnnnnnnnnnnnnnnnnnnnnnnnnnnnnnnnnnnnnnnnnnnnnnnnnnnnnnnnnnnnnnnnnnnnnnnnnnnnnnnnnnnnnnnnnnnnnnnnnnnnnnnnnnnnnnnnnnnnnnnnnnnnnnnnnnnnnnnnnnnnnnnnnnnnnnnnnnnnnnnnnnnnnnnnnnnnnnnnnnnnnnnnnnnnnnnnnnnnnnnnnnnnnnnnnnnnnnnnnnnnnnnnnnnnnnnnnnnnnnnnnnnnnnnnnnnnnnnnnnnnnnnnnnnnnnnnnnnnnnnnnnnnnnnnnnnnnnnnnnnnnnnnnnnnnnnnnnnnnnnnnnnnnnnnnnnnnnnnnnnnnnnnnnnnnnnnnnnnnnnnnnnnnnnnnnnnnnnnnnnnnnnnnnnnnnnnnnnnnnnnnnnnnnnnnnnnnnnnnnnnnnnnnnnnnnnnnnnnnnnnnnnnnnnnnnnnnnnnnnnnnnnnnnnnnnnnnnnnnnnnnnnnnnnnnnnnnnnnnnnnnnnnnnnnnnnnnnnnnnnnnnnnnnnnnnnnnnnnnnnnnnnnnnnnnnnnnnnnnnnnnnnnnnnnnnnnnnnnnnnnnnnnnnnnnnnnnnnnnnnnnnnnnnnnnnnnnnnnnnnnnnnnnnnnnnnnnnnnnnnnnnnnnnnnnnnnnnnnnnnnnnnnnnnnnnnnnnnnnnnnnnnnnnnnnnnnnnnnnnnnnnnnnnnnnnnnnnnnnnnnnnnnnnnnnnnnnnnnnnnnnnnnnnnnnnnnnnnnnnnnnnnnnnnnnnnnnnnnnnnnnnnnnnnnnnnnnnnnnnnnnnnnnnnnnnnnnnnnnnnnnnnnnnnnnnnnnnnnnnnnnnnnnnnnnnnnnnnnnnnnnnnnnnnnnnnnnnnnnnnnnnnnnnnnnnnnnnnnnnnnnnnnnnnnnnnnnnnnnnnnnnnnnnnnnnnnnnnnnnnnnnnnnnnnnnnnnnnnnnnnnnnnnnnnnnnnnnnnnnnnnnnnnnnnnnnnnnnnnnnnnnnnnnnnnnnnnnnnnnnnnnnnnnnnnnnnnnnnnnnnnnnnnnnnnnnnnnnnnnnnnnnnnnnnnnnnnnnnnnnnnnnnnnnnnnnnnnnnnnnnnnnnnnnnnnnnnnnnnnnnnnnnnnnnnnnnnnnnnnnnnnnnnnnnnnnnnnnnnnnnnnnnnnnnnnnnnnnnnnnnnnnnnnnnnnnnnnnnnnnnnnnnnnnnnnnnnnnnnnnnnnnnnnnnnnnnnnnnnnnnnnnnnnnnnnnnnnnnnnnnnnnnnnnnnnnnnnnnnnnnnnnnnnnnnnnnnnnnnnnnnnnnnnnnnnnnnnnnnnnnnnnnnnnnnnnnnnnnnnnnnnnnnnnnnnnnnnnnnnnnnnnnnnnnnnnnnnnnnnnnnnnnnnnnnnnnnnnnnnnnnnnnnnnnnnnnnnnnnnnnnnnnnnnnnnnnnnnnnnnnnnnnnnnnnnnnnnnnnnnnnnnnnnnnnnnnnnnnnnnnnnnnnnnnnnnnnnnnnnnnnnnnnnnnnnnnnnnnnnnnnnnnnnnnnnnnnnnnnnnnnnnnnnnnnnnnnnnnnnnnnnnnnnnnnnnnnnnnnnnnnnnnnnnnnnnnnnnnnnnnnnnnnnnnnnnnnnnnnnnnnnnnnnnnnnnnnnnnnnnnnnnnnnnnnnnnnnnnnnnnnnnnnnnnnnnnnnnnnnnnnnnnnnnnnnnnnnnnnnnnnnnnnnnnnnnnnnnnnnnnnnnnnnnnnnnnnnnnnnnnnnnnnnnnnnnnnnnnnnnnnnnnnnnnnnnnnnnnnnnnnnnnnnnnnnnnnnnnnnnnnnnnnnnnnnnnnnnnnnnnnnnnnnnnnnnnnnnnnnnnnnnnnnnnnnnnnnnnnnnnnnnnnnnnnnnnnnnnnnnnnnnnnnnnnnnnnnnnnnnnnnnnnnnnnnnnnnnnnnnnnnnnnnnnnnnnnnnnnnnnnnnnnnnnnnnnnnnnnnnnnnnnnnnnnnnnnnnnnnnnnnnnnnnnnnnnnnnnnnnnnnnnnnnnnnnnnnnnnnnnnnnnnnnnnnnnnnnnnnnnnnnnnnnnnnnnnnnnnnnnnnnnnnnnnnnnnnnnnnnnnnnnnnnnnnnnnnnnnnnnnnnnnnnnnnnnnnnnnnnnnnnnnnnnnnnnnnnnnnnnnnnnnnnnnnnnnnnnnnnnnnnnnnnnnnnnnnnnnnnnnnnnnnnnnnnnnnnnnnnnnnnnnnnnnnnnnnnnnnnnnnnnnnnnnnnnnnnnnnnnnnnnnnnnnnnnnnnnnnnnnnnnnnnnnnnnnnnnnnnnnnnnnnnnnnnnnnnnnnnnnnnnnnnnnnnnnnnnnnnnnnnnnnnnnnnnnnnnnnnnnnnnnnnnnnnnnnnnnnnnnnnnnnnnnnnnnnnnnnnnnnnnnnnnnnnnnnnnnnnnnnnnnnnnnnnnnnnnnnnnnnnnnnnnnnnnnnnnnnnnnnnnnnnnnnnnnnnnnnnnnnnnnnnnnnnnnnnnnnnnnnnnnnnnnnnnnnnnnnnnnnnnnnnnnnnnnnnnnnnnnnnnnnnnnnnnnnnnnnnnnnnnnnnnnnnnnnnnnnnnnnnnnnnnnnnnnnnnnnnnnnnnnnnnnnnnnnnnnnnnnnnnnnnnnnnnnnnnnnnnnnnnnnnnnnnnnnnnnnnnnnnnnnnnnnnnnnnnnnnnnnnnnnnnnnnnnnnnnnnnnnnnnnnnnnnnnnnnnnnnnnnnnnnnnnnnnnnnnnnnnnnnnnnnnnnnnnnnnnnnnnnnnnnnnnnnnnnnnnnnnnnnnnnnnnnnnnnnnnnnnnnnnnnnnnnnnnnnnnnnnnnnnnnnnnnnnnnnnnnnnnnnnnnnnnnnnnnnnnnnnnnn

SEQ ID NO: 1223 - DNA, 1231 bp, Mus musculus
gcaagagacacagtcctgggaaagtcctgccggctatccagacaattataaaaatgtgtctcccaaggtcagcgttccaacagcctcaccctcggcatccagcagctcctctcagtgccggtccagcatgtgtcaatcacgctacctcctctttttggccacccttgccctcctaaaccacctcagtttggccagggtcattccagtctctggacctgccaggtgtcttagccagtcccgaaacctgctgaagaccacagatgacatggtgaagacggccagagaaaaactgaaacattattcctgcactgctgaagacatcgatcatgaagacatcacacgggaccaaaccagcacattgaagacctgtttaccactggaactacacaagagagggagctgcctgcccccacagaagacgtctttgatgatgaccctgtgccttggtagcatctatgaggacttgaagatgtaccagacagagttccaggccatcaacgcagcacttcagaatcacaaccatcagcagatcattctagacaagggcatgctggtggccatcgatgagctgatgcagtctctgaatcataatggcgagactctgcgccagaaacctcctgtgggagaagcagacccttacagagtgaaaatgaagctctgcatcctgcttcacgccttcagcacccgcgtcgtgaccatcaacagggtgatgggctatctgagctccgcctgaaaggctcaaggccctctgccacagcgccctcctcacacagataggaaacaaagaaagattcataagagtcaggtggtcttggcctggtgggccttaagctccttcaggaatctgttctcccatcacatctcatctccccaaaggtggcacagctacctcagcatggtcccctccatcgcttctctcatattcactatacaagttgtttgtaagttttcatcaaaatattgttaaggggcgaagacgtcctcccctcaatgtgttagcagaagagcaagaactgataagctattgtttttgtgccaaagtgtttatgaaaacactcagtcaccccttatttaaaaatatttattgctatattttatactcatgaaagtacatgagcctatttatatttatttattttctatttattataatatttcttatcagatgaatttgaaacattttgaaacataccttattttgtggttctaataaagtaatgttatcacttca

SEQ ID NO: 1224 - protein, 243 aa, Mus musculus
QETQSWESPAGYPDNYKNVSPKVSVPTASPSASSSSSQCRSSMCQSRYLLFLATLALLNHLSLARVIPVSGPARCLSQSRNLLKTTDDMVKTAREKLKHYSCTAEDIDHEDITRDQTSTLKTCLPLELHKRGSCLPPQKTSLMMTLCLGSIYEDLKMYQTEFQAINAALQNHNHQQIILDKGMLVAIDELMQSLNHNGETLRQKPPVGEADPYRVKMKLCILLHAFSTRVVTINRVMGYLSSA

SEQ ID NO: 1225 - DNA, 27277 bp, Homo sapiens
  misc_feature (1)...(27277): n = A,T,C or G
acacagacataaatcagccttcataagcattgcaactcaggttcaaatcagcttatttcctgattggtttaaagtgttctgctttattctgactgcctgacagaaactaacatcatagagagcctctgcagtttttcctatagaatgtccagaattcaatttaaaattataggtgtacaaagacaggaaaaagagattaaaaaatacacaatagaaacagacatgcagattatccagatgctaaaattgtcagatacagaatataaaataacactgattaatatgtttaagaaaacagatgacaaaatggagaatttcaccagagaattgaaatctaagtgtttttttaaaaaaggtgaaaattatgaaactgtaaaatacaacaactgaaattaaaacttcaataaataaatttgacaatagtttaaacacaggtgaagaaagtattagtgacctagaagattggttggtagaaaatatccctatggaagcacccaagtatttttaaaaagaaaaaatatgtaggcaataccataaaaacaggaaaaggtctgatgtgtaattagagcttcagaagggtaggaaagtgaaattgagttgggagcaataggtgcaacatttgaagaggtaatgacaaaaaattttccaaagctgatttaaaggtatcaagctatagattcaataaatgctacaaatctcaagcaggataaatacaaaaaaatacacatagaaatgtaataagtaaattgctagaggggaataacagacaaaaagaaaattctaaaagcagtcagataatcgtcctaaacaaataaattacctcaaagaagcaacagtaagactgatggctaacttcttaacagaaacaatggaagccagaaggcattgtgatgtcatctttaaagtgatgaaagaaaataactgccaaacaaaaatatatttcaaaaattaaggcaaagtaaaaatattttcagacaaacaaaaggtgatggaatttgttgtcagcagacttgtgcttttaaaaagtctaaaggcatttgttcttgaggcagaagaaacattatcactgatggaagagcatatacaagtgaaatgaatgaaaaacactgttgggaggctgaagtgggaaaatcacttgagcccaggaatttgagaccagccttggcaatatagtgagatcctatatctacaaaatttttttttttaattatccaggcatgatggctggcacacacctgtagccccagctatcaggaggctaaaggtgggaggatagcttaagcccaggacttctaggctatagtgagctatgatcacaccattgcactccagcctgggcaacagagtgaaaagtctctaaaaagaaaaggaaaagaaaaagaaaaaaagagataaacactggaagccaaacatgaataatgactgtataaaacaataaaaatgggtgtttgggcactttaaaaagctagtgccagcagcctgcttttcaagtctcatgttgagaaattttcatttcataaagagaaaaaaaaatgaccttgactaggaatattctgttttcttccacattaggagcccaaataccatcatagtattactaatactcaccaaagagggcatgtgatggacccttgagggattatttaaagccctagtagtcactgtttagagatcaatgccatgaaaggaaactggcagcctgctggggcaatgatgcttgtgttacagtgctctaccctctatctcattgtgtatacagtatctcaatagctcctcccaacaaccccaccaggcaggtgtatttctccctattttatagaagtttagaaacattaaagaaatgaccaagatcacacagctagaaagggatggaaactgattttagcctgaactgcaaagcccatagtttttccactttacaaggccatggggcagaaaaannnnnnnnnnnnnnnnnnnnnnnnnnnnnnnnnnnnnnnnnnnnnnnnnnnnnnnnnnnnnnnnnnnnnnnnnnnatagatggatggatgaaaagatggatggatagatagagtcagacacaaagcccctgacttgagggtagagagttaatccacttacatactcaatgtttgatgttcatatggtaaatcctgcaagaatgctgctacatagaggaaattctctgctcaaaagctgtcagaatggctacagcagctgtcttagcagttaaaatacaaataaaaacaaaacaaaaataaatgaagctataatacatttgtatgttaaataattcaaaaagtacagagcatattcaataaaagtcaggttttcctcctacttcaaagactcaatctacttctttagaggcaatggtcactactcttagaagcatagatttatatctatactacacgtgtatctatgtgtgtctgtacatgaatatacttttttctctgtacaaatggaagcatattatacactagtctgaaccttgattttgcacgacttttcaagtaatgaagatttttcctgtcatatatataaatctgcctcaatctttttgatagttgcataatagtcccttgaaaagatgagtcatgttttatttaaatggtttcctgctaataagacattggaagcatttcaagttttttgatactaaaaatgatatttttaatggaaataagtctttatgcatacatgcaaatagttttataggataaattactagaagtagaattgctgaacaagtgtatgtgcatttttcattttgatagctattgccaactatccctccaaatagatttcactagattacacatttccacatacccttacacactttacaaactatcaaacttttagctttgcaaactacaggataaaaattatatctattatttttatttgcatttattcaattatcagtgcagctgagtatttttcatatgtttataagtaatttgtgtatctttttctctgagctgtctgttcatatcctttgcccagttttgaattgaattattggcctttttcttattgacttttgcatttacacagtgacattagctcttggtttgttacatgttcatgtaaatgttttttctgggttatgatttctctttaaaagttgtctataatattcctatagacaactcaaaattcctatagacaacgaatcaaaatatttgatttttacagtcaaatttatcctttttttctttataatgtctgggcatcagatgatcttaattattcatgagactacaatgcccaggtgttgtatcatattcagataagttgctaaactgtctcaagatgcagaaaagtttgcaaaagtattcatacaatctttattctggagcaccaataagtaataaatgacacctttctggattttttttcttgaagcccgttgtcaagatttttgaagtctctcaaaaacaggatagatggctcatggatgttccctacagacactgtgtcatgaatatttaggactcccctccaccgctattgagaagttgccacttaatgtttcaaagagagcaaagaaatagttttggaagaaactgtatgtgtgtcttaatctaaaattaataactatatttcactatcactcactgtagaatgatatctaatattgttgacattctaccactttacaaaattcttacctgttcactgtataattgatctgcgtgacaaaactagcacaacaaaagattaccatctccattttgctgatatgaaaattaggaaaggcagtggcttgccccagcttacataggtaccaagtagcagaaagaggctagaaattaggtcttttgatcgtaggcccaaagttcctttagtgctatagcctttctggctccgctcacttactatttctccccctgctgctcagatatgtcagcaaagaagaaagagctccacagaaccaagctcctcagcatgtaacactgggggttggtgttcaacaaggaacacagagctctgcttcttaccctgacaggccacctttcaggattgaagctcaggattggaatccagattgatgccatgtgggcaccagctgatttatgctcaagttgaatgacatttatggacaagagccacaggaaaactgacagcagagaccttgctattttatgaaggaaaatcacgtttacagtgctgacctacacatgcaaatttacggtctcaactgatcacaagcctctttgggatctcacttcatctgaggatgagctgccaccctaaattatggcaccaaagatatagttccaaatcttctgttcaggtcctatgactctgaccttgtctacttgtcagggagaataacaatgaagacaggcatatcgagctatctactcaaatcagccagggtttctcttccagcactactgatactttgaatcacaaaattatttgtctgggggggcggatgggcgggtgaggggctatcctgtgtaccgtagaatgttcagcagcatttagcaacattcttctacccactagatgccagtggcaacccccttcctccaattatgacaactcaaaatgtctccacacattgccaagtgtcccctggggagcaaggccatctccaactgagaaccacagaaatagatctttaatatattctgtcaaatttttgaaaagacccttgtctctcagtgatgaaaatgcctgattgactcatagctcaaaccgaatgggaaaggaataactaacaataaaagctacctgaattcccagcactttgggaggccaaggcaggcagatcacgaggtcaggagataaagaccaacctgggtaacacggtgaaaccctgtctctactaaaaatacaagaaaattagccaggtgtggtggcagccgcctgtagtcccagctgctcgggaggctgaggcaggagaatggcatgaacctgggaggcaaagcttgcagtgagccaagattgagccactgcactccagcctgggcgacagagtgagactccgtctcgaaaacaaaacaaaacaaaacaaaaaactacctgaatgtaccaaatagcaattgaagtttgcaaacaatgaccttgagtcatctgcttacagaaggtgtctatctgtcttttggacaaaggacttctgatgaagaggatggagtggaccatattctttaatccatgacgttatttgtccccatcaaatacaaatatctaaatgtatttatatattttcattatcactagtcctcattctcattcccctcactccccagtgggatctatcctactaatatatatccttttgtctgtgtctttgtataatgtgtactattttgaatatatcattctcatttaagtcaatagagttccgcaatcacttactcacaattcttaaacttacacagctctggacaccagaagttttctcttaaattcttaacagcgaaatctgactgaagcgacaaggggttacttggggttctttagccactcaatgtaactattcctatgttttgctgcggaactattatgcttgattatgcgatgccacctcttccttttctaaattccaagcattttgaattccaaaaacaaatctgagcccccccatttttttctttttctttctttcctttttcttttcttttaagtgagacagggtctcactctgttgcccaggttagagtacagtgacacaatcatggctcactatagccttgaccttccgggctcaggtgatcctcccacctcagcctacttggtaggtgggagtacaggcatgtgccaccatgcctgactaatttttgtattttttgtggagatggggaatccctatgttgcccaggctggtctcaaactcctgggttcaagcaatccactttccttggcttcccaaagtgcttggattacaggcatgagccactgtgcccagccccaaagggttttaattgtctacttatacattatagagagagatcttactctgttttcctgtttttactcagtattatatttttaatacatatccatgttactgcatgtacatctagtctattacttctaactgccgtagaatactccatgaagtggatccctacattccactcacccactcccccagtaatgagcagctacattgcctccagttccccatcactacaaacaatgacttaatgaacatcctcatacatgttcctttgtggacctgtatgagaatctccataggatatacacccagggttaacagctgggtcatgggtgtgaatatacttaatctggtcaaggaatgccagaatacccttcaaaacagccatgtcagcctactggcatggtgtgatataatagatcctgtagtcccccattttcccaacacttaccagtatccagtgttctcaacttgtcagtctaagaggtgtaaagagatatctcattctttttttcatttgcattttctgatataactgagcctccaggtatgctcattagtctttggggtttcttctcgttaaattgcttattcatgagctttacgcattttttactagtgtttctgtctttttcttgctgacttacaagagttccttgtttttagacattgaaaatattggttttagacactgaaaaatatcttctctcaatctgtcagctgtctgttcatttggttcatgcatagaggaaatgtgtaaaacagaaatcttcatttttatgtaatccaattgataggtattttgccttatggtttggagctttagaagttttaaaaaagtccttcccacttataagtgacaaagacagtcctctatattttcttctactactgtaacaattttacttttcacatttggtctttaattcacttccaaatggattcacctctgttgttttagattggagtccagttttatttttcatcatacgctgaacattttctctttttaaaaaaattttttgtagggagtttttgctcagactggccttgaactactgacctcaagcaattctcctgccttgacctcccaaagtgctgggattacaggtgtgagccattatgcccagcccattgagtattttctactaaatattgcatgttttcctcattgatcagggaatcatctgtattatcttatacttaatacccaaatatacaaatctatctataatttctctactctgtttcaatggtccatatgcctgatctgttgcaaagatcactactttaatttctatggctttaaattatgtccatatgtgatagggttagtcccccttttcattattcccttagcatttttacttaaggccaggaacagcagctcacgcctgtaatcccagcactttgggaggccaaggtgggtggatcacttgagcccaggagtttgagaccagcctaggcaacaaaactagactccgtctctacaaaatacaaaaataaaaattagctggacatgatggtgttgcctgtggtccaagctactcaggaggctgaagtgggaggatcactttagcccaggaggtcaaggctgcagtgagctgtgactgtgccaccactacactccagcctgggtgatacagtaaaaccatgtctcaaaaaaaatttttttaacttagtcatagattttattacatctgtattttagagtaggcttattattaagtttctgagaaaatttatttgtagcttgtattggaattacattgagcatgtgaattaacgaaaagaggcttaagctttctatatagagaaaccttccacccaagggtatagaattatttaattaaatcacactatattcttgactgaactttaaaatttttctccaaacactattctgtagttatccaagctcatgtaataatcataataactctatactgtaggtacttttattatcatcatttaacagatgaggaaactgagcccagagagataaataactcacctaagaacacacagcaagtaagtagcagaacctggattaacatagtttagtccatactcttagccattatactgcctctgtatctacagtcagttactttatagtttggctgcttctatgcatgtcatcttgtttttattacattttctgatggattgttgcagatacaaagaaaatcggctgattttttttaagttgatatgtgtattgcatgatgttgttaaattctcttcttagttctaatagtctattaattttttttctttttgtatatcaactgtaaaaagtgacagttttaccttttcttttccaatgtttaaagctctcatttctttttctttccttatagcattggccgagacctccacgacaatgctacacactgtgaagtagtgattgtgagctaagactgtcacttatagaaaaatcatgtattcctagaagaaggttttcatttcatcttagctagaggacatggagcacttcaggaaactatttcacaaaaatgtaaattagaaactgtgtctggtagccaataatccatttttaacagtggccctgtgctcatctaagcaacagaaattacttttgtataggagatggcccttccaggggagaaacagctcagttgtgatacacttgtcttcatcctgactttaagtacatttaactccacactaaacccttgtggccacaacacagctctgcacctgtcatttgctctagacaaactgctaaacgcaattgtttctgacaatggattactctgtatcccgtgggggaattctcagacagcagcattagaaggggccttagagatcaaccatttctcttattttacacacacctaaaactccctacagccgtgcttcatcagcttcgagcagatgagccacccagaaggcagctccagttattaggtcctagggcctgggtgtagtcaggccctttggaagctccaagtcagagatcaaacacatcctccccactacccacgcctagggtgactaatgcctgtgggaaaaacaactgaactaaaaagtcccacaggaacctcaaacccagcacatccaaaatggaacttctcaccatctcctccaaactcagtcctcttatacagtaatccctgtaaagctagaacaatctccattccccattctcagggccttcctctcccgctcacctgaggagctaccaagccttggcccacaagccctctgagagtccctcctgcccaccctgtgttctccatactgaataaggacttggccacaccttgtcaactcttccctctgctctactcctgacccctggatccatccttcatgctgtggctgaagggatccccccatcatgcaaattctgccacatctcccgcctaaaacccaggaagactccccactactctcagcacagaaagtacactccttagtatggcatcccctgccctcatggcatggccccatccagccctccagcctcacaccctgcaaggacacctagacccccacctccctcaacccttcatgactgcgcttctgatccctgtttcccctggctagaccctgcgtgccctcccgctggaagcggtctaatgcctgcttgtttttaacactcaggttggggcccctgcctgctcccgggagcctttgctgactcctggaccccgttgctccggctgagcgtgggctctttctctaggtctttcctcccaggactctgtgtattcatcctatcgttaaactggattctctacaagagtaataattgcagagtcagccagctctcatcccttttcaggtttcagaaaagacctgtgaacaaaacgccttgagtctgatttagtgtggcaatgccccaagggtcctgttctccctgggtgtcctgcacctggtgcaacgtcggcctggcatctagtgagccatctaaaggaacgatgatgagtgaatgatttgcctaccccttccagtactaggctggaggtcgtggttagggcccatccctacgcaggacatgcaaagtgggaggcactcctctctctacgtcggcagggggcgctgcacagctgcggggcggggtagcttagacacggggcgtccggctaaggccggggacccagggtggtgggcggggtgtcccgcccgcctgtggaccccgcgcagtaactgcgaacatttcgctttcattttgggccgagctggaggcggcggggccgtcccggaacggctgcggccgggcaccccgggagttaatccgaaagcgccgcaagccccgcgggccggccgcaccgcacgtgtcaccgagaagctgatgtagagagagacacagaaggagacagaaagcaagagaccagagtcccgggaaagtcctgccgcgcctcgggacaattataaaaatgtggccccctgggtcagcctcccagccaccgccctcacctgccgcggccacaggtctgcatccagcggctcgccctgtgtccctgcagtgccggctcagcatgtgtccagcgcgcagtgagtactcagcccgccaggtctttggctcgctcgggtgcggaggggcggctgcttgggaagagtgggtagaaactcaagtctgcctaaggagagactggaacagcagcagccgtctcctgcaaagaggaataagaataggggtctcaccgtgtgctaaatagggcatgtctcttttcatctcgaaacagcctgatgagctatcattatgcccacttcgtagaggagaaactgaggcccagcgtgggagatttcctgctttcctgcctagggtccctcagctacaaacagaaggcagatcctagccagttctaaagtcaggcttggccgggtgcaatggctcacgcctgtaatcccagcactttgggaggccaaggcggacagatctcctgaggtcaggagttcaagaccagcctgaccaacatggtgaaaccccgtctctactaacaaatacacaaattagccgagtgtggtggtgggtgcctgtaatcccatctactcgggagtctaaggcagggaaaattgcttgaactcggaggtggaggttgcagtgagccgaaatcgtgccactgcactccagtctgggccacagagtgagactccgtcttaaaaaaacaaaaaaagtcaggctttctcactccactgtttttaaaacactgggtcccaagtctgactcagccacttcaccacctggtctgggtttccctgatcaaaaacatgtaggctttctctgggtgagtgttgggttcaacacccttgtccaagctcatctctagaccctcacagggagctggcttctagccctagaatagagtggcgctttgtaataactcgagtcatctctcaggtgttgaaggaaaagtgttggaaatgggttgagggaggtgggtgccaagcatgaatggatgggtgaaggtggccagaatggagggaaggtggtgcaggcaggccatccaggctgaagctcctccacctgctcctcttccttccaggcctcctccttgtggctaccctggtcctcctggaccacctcagtttggccagaaacctccccgtggccactccagacccaggaatgttcccatgccttcaccactcccaaaacctgctgagggccgtcagcaacatgctccagaaggtgagcctttcctgtcctctccactgtggacctgcaccctccctgaggaaggggcctctgatcctcccctctggtacctgatggaactgcagagaaattgtggaagttcattagcagctgtcaacagcaggagagggaactttacaaatggcccaagtgttaaagagtcctagtgaaattgtgtctccagagaaagcaagagtagtaataaattataatgatgttggttttggctatgtctacactgagtaaagtggatatttgcagtgttcctgtagcctgccaacagagatagaattgtgtcaggtccacatggtttctctggcaccacaccactgatcaatcccggaaatagttacttgggtgcatactctgtgttggggggcaggggtacaaagatgaaatagccttgtccctcctgctgcccaccagcttctacttggtgacacagttccttcttggagcaacacatctcagggaggactatgacagtgcacatgcagccttcattttctagggaagagttacctaattttatttacagcttcgttcttttaggtttcatattttaatgtaaaaaacattgccgttaaaaactgctccagtagctactgctgcaaaggctaaaggctaatgttttaaaagatgtcctctgcctttctgctctctaggaattttttcttgagtattttctagcttgttgccttaggaatatcttaaaataagctcaatgccaccaagccttcttaaagggctcctttcccctttcaatctttcataatgtgctgtgcattgctcctcacaattcaattaatcttaattggacagggggctcaagtgaaaactgctttgtttcccgaagaaaggttcaaaatgggtaacttttaggtgctccaattcatatagatttttttgtgcaaaagctgacacccctactcccagatatagtcctaagggtcaaaagattatagaaatcaatttaatgttttgtacatcatttgtcaaatttgctgtagtagaaaacaaatgaggtagatgcaagtgattcaccggccatatccagggcacaggtttgtagaatttgggctatatgtttattttttagtttgatgccattcaaaaaccaaacatttcaattaagatttcaaaattctagcttctcttgaaaagatctgaagaacaacactggactcacacctccaaatctaactctttataacctgctcagaatagtggggttgcccaggtctgtttaaacacctccgggaatagtgtattcatttcctactgctgctgtcacaaatgtagtgggtttaaatgacacaaatttattatcttacagctctgggcatcagaagtccaaaatgggtcctactgggctaaagtcaatgtgtcagcagagctgtagccctttctggaggctcttggggagaatctgttgccttgctttgtcaggtctagaggctgcccacattccttgacttgtggccccttccattgtccataccagcaatgtctggttgagtctttctcatgctgctccctctggactgaccttctacccgcttctacttttgaggacactgcttacactggattcacccagataatccaggatcatctctctactcttagatcagctgattagcaaattgaatgtcatctgcaccttcattcctctttggcaggtcacatagctcattaccgggttccagggattgggaggtggatgtctttggaggtggagaattggtctagctaccacagaaagggattttactacttgtgcccaaacgtattctgaattttcaggccttgcttcttggctcatgctgttacctctgtctgaaatttccctcctccattgtcgacactttactcctcttaatgtgggtgtcccaactctaggaagctttgcttcccttcctgcccctcctcagaagcttcatgcccttctcaccatgtctcacctactgatgcctcctggtcatttgggcaattgtctgtctcagcagctaaacttgcaatccaggagggtatacatggtcctcttctctgtcatgttcttagtacctaatggagtgcctgccacccattaggctgttgaatggaaaaatgatcgtaatcttcaatcatacagtcctttacttcctaagatacatttcataattttacccaacggtgctttccaacacactaagatgacatctctgtgtatgtgtgtgcgtgtgtgcactgcaaattaaatctcagcttgtcttaagggtttgcatgtttgttatatccatcaaactgtgaccttaacagttccccctttagaagttatacttgaaataggtattcatagaatacagtcactttagcaaaagaagaaacaattttcaccagaagcaagtgtcacagtgaggtgtggaggctggttagcacaggctgttgacatgatttattgtgtttacataatgaaaaaatatgtaatccagagaaacatgccccaagcttagggagaggagggtgagagacagaatgtaaggaatctattttcttttgtattatgaagaaccagaatttcctgcaagtcaaagtgacagaggtcaagggcagccagccggagccttcctggcaccctggcttaccagccttgtggggtgccaggtgcattatcaatgttataaactgagtttctccttcattttttataggccagacaaactctagaattttacccttgcacttctgaagagattgatcatgaagatatcacaaaagataaaaccagcacagtggaggcctgtttaccattggaattaaccaaggtataaaggattttcctcccagagcatgcagtgtggttaaaaactgtgcatcaaatctcacctgcttctaaaaattcacgtttctggtatccatcattatgggattttaactggtcctacttcagaagttagatttgggagaaaaattatttttaaaaaatggttttttttgcaacaatgtgaatacacttaacacttaaaaatagttcagatgctaaatattatgatatgtgtttttaccataataaaaaaaatttgagacctgaagagtcagaaagatttatactaagaattaatactttgatatatgattttttccctctagaatgagagttgcctaaattccagagagacctctttcataactgtaagtcaaaaaatgaaaagtttcagcctgtatgatgaattcatatcactgatgtctgattattttttcctctagaatgggagttgcctggcctccagaaagacctcttttatgatggtaagacacacagctctttcctcaaatgcaatgggggaaatgtttttagcccatctcaatggatacttccccatcttgtcatgtcacccaggccctgtgccttagtagtatttatgaagacttgaagatgtaccaggtggagttcaagaccatgaatgcaaagcttctgatggatcctaagaggcagatctttctagatcaaaacatgctggcagttattgatgagctgatgcaggtaagacttcattctatcagtgagagcacctttttcatgctaaagataaccagccagggtctttgataaagagatataaaaagaggtctggaggccttttaaaggcctgacagacctacattttcaagaagacagccttgagggtgccgtctatagggagcacaaatgtgagcagatcacattatgaaaagcagactccaaagtattcactctgtggtatcccccacactcggcaaatgtttttgtgcattttcttatgtcagcctcaaaacaaccatatgggatctgcacaaaggagggaaccaaaccttaggagagttaaaccacttgtctgaggctctgcctcttaaaatccttcaagaggatttcactacacttaccttctcactcacctctaaaggctccaggacgtgctccaggatttgcatgcaaggggccagtttgcatatctgcaaatattgctgggaaacaagcaagattggtgcctgattatgacccattgtgaaccaaaatgtgaaccaaataaaagaatgacctatcatctggggcatctataatgttattcataggcaagaacttgctttgttatgttctgaatcaccataacacagatgctaatataaaacaaatatttatataagtgagggtgactgctttggtgacgaggacatgggataaaaatatggtggcagaaatcattgtctgaaaagtaattgttttacttttattcttttcgtgtgtgtgtgtgtgtgtgtgtgtgtgtgtgtgtgtgtgtgtgcatgtgccagatttcttgtttgaaaggcaatgagcttcatccaagtatcaaagaatgttagcatctagagagctgtagttgctatttcatttttaggaccaagagttgggtgatttgggtgctagaatcaattctaccagtaaccagacaactattcccaagtcacttaacccctctgtgcctcagtttcctccagtataaaatggggtgactttattctagctttcttttagactttttgtgaggaagatatgaaagtatttattcatcaagggtgcaaatgtaaggttttatattctgttatcaaatcaaagtgctaaacttgggaaattcattgccaggtttatctgacacaaatggcatgtcttcagtaaacaggcctgttactgatagtgagttctgatcaatagcaatccatcacctccctgtgctaaacagaagtgggctttttaatgtaacatatataaaattaattagatattgcagcagatgtcattttaaaggaactgtttctttctaagacacaactcccactgatgattttttctaaatagttttaagggtcttttcagagctcattgaagatggatgtgcttggaaaatgagtatttcttttctcattctgcctggtgatctggctgagagtagatttggattgggtttaggagtggcataagggactgagttgcaggctctgagacatgtactggcttcactcatttttatgaatgaatatttgaattttggaataccatgtaagtcatgcttactgttcattctcctaggccctgaatttcaacagtgagactgtgccacaaaaatcctcccttgaagaaccggatttttataaaactaaaatcaagctctgcatacttcttcatgctttcagaattcgggcagtgactattgatagagtgatgagctatctgaatgcttcctaaaaagcgaggtccctccaaaccgttgtcatttttataaaactttgaaatgaggaaactttgataggatgtggattaagaactagggagggggaaagaaggatgggactattacatccacatgatacctctgatcaagtatttttgacatttactgtggataaattgtttttaagttttcatgaatgaattgctaagaagggaaaatatccatcctgaaggtgtttttcattcactttaatagaagggcaaatatttataagctatttctgtaccaaagtgtttgtggaaacaaacatgtaagcataacttattttaaaatatttatttatataacttggtaatcatgaaagcatctgagctaacttatatttatttatgttatatttattaaattatttatcaagtgtatttgaaaaatatttttaagtgttctaaaaataaaagtattgaattaaagtgattctgcaatttttctaatgtacttttaagtgttaaaatatacattgtgggaaaattgaaaactctgatgagacttcaacaaaattactctggaaagaatgccacaatattcttattcctttcctagtccctttcatctcattttaaagggaccctagtaagacaagatatgctttactactaaggcagccaagtgagtcatggtttttgagggtttattatttttgttcaacataagactaaaagtatgctgtgcattagaaaaatacttcatagtattcttcaaccagaaaaaaaatgtcactaagaggccttctagcctaattattctaatttttgtgaccctttgggctctgagagaaaagttgtctctaatttgcaaccagaaaatctctccatttgtttaaaactgtatagaacttttgcctgaaccacatggataattgccttactttggcttaagagatgtgctcttaatgagctaaatgttaaattccatctttttaattctctaaaccaggagtccccgatccccaggccatggagtggtactggtctgtggcctgttgggcagtgggccccacagcagtaggtgagtggcaggtgagcaagtattaccacctgagctccgcctcctgtcagatcagtggcagcattagattctcataggagtgtgaaccctattgtgaactacacatgcaagggatctaggctgcatgctccttataagaatctaagtaatgcctgataatacgaggtggaacagtttcatcccgaaactatctttgccccctgccccccgggtctgtggaaaaattgtcttccacaaaaccagcccctgctgcccaaaaggttgcggaccactgctgtaaatcatgtaaatcttaggtttcatgacttagttcattttgtactgctgtaacagaatatctgagactgggccatttgtaaagaacagtgatttatttttttactgctctggaggttgggaagttcgagaacaaggggccaacatctgatgatggcctttgtgccccatcatcatatggcggaaggtgagagagagagcaagggggtgctgaacgtgtccctttataaggaatccactcccatgataacagcattaatccattcatgagggcagagtcctcattgcctaatcacctcgtaaaggtcccacatctttatactgttacaatggcaattaaacctcaacgtgaggctgggtgcagtggctcactcctctaatcccagcactttgggaggccgaggtgggtggatcacctgatgtcgggagtttgagaccagcctagccaacatagtgaaaccccatctctattaaaaatacaaaaattagccaggtgtggtgacgaacatctgtaatcccagctactcgggaggctgaggcaggagaatctcttgaacccgggaggcagagcttgtagtgagccaagatcgcaccactgcactccagcctgggcaacagagcgagactccgtctcaaaaaaaaaaaaaaaaattcaatgtgagtttgggagggggacacaccacattcaaaccatagcaattcacctgacacaatacaatttaatgttaaggctttgataatccattcctccttaatagaaaaaggacctaaaatacaaaatattttgagtgacccctttcctcagttactcctcccaactgaatcccaatctttctccctgtaaatgtgttatctccttcccaggtcctcctgcatggcaaacattctcgtttttcaaattcttgccctattagacattcaataaaatagaaaccatcagaagctagatcccatcacctatctccttctcttgagtgattcttccacaatcttgaatggtccacaagtgcttcacagacatgggtttctttcaagtgtcgagtctggggtctcagcagctttgacagtgaggagagacgaacggggctgtagagttgcagccacccctcacttggaatggtgactactggttgtctgggcccagagatcaggagggacaagcagacggtctcttccatggactgggtttacacacaagaacacgtgtgtttcttctgttctagaaattagcatgggatatgcttcaaaaacatgactggccacagaaacagcttcatggttcattccattctttattgcatggttagtttttcactttttttaagcctgtgtctgcagtttacaagtagtgtagtatgcttgcaaccaaatcattccaatgctccccattggtctcctcttctgaaaaaggaaggtaatactagaatctacctaaaaggatcagagaaagggtaaaatggaacaactcgtgcaaagggctagcgttgcacctggcacatagtaagtgcacaataaatgtaagcacattttgaaatgtattattagtctttgggctaagcacctgcaccgaatttgttacctcctctttgctgctatttcctcattgatgaaattcagaaaacggtgggacctaattaactgtgttattgtgaagattaaatgacacaatacagtgccagcacctagttattactcaacataaatttgtcacagttctcacaagacatcagaacacccgctgatgtgctgtcccccatggcactcagcatattaagtgtggtcggcacaagcggctgcctggtgtgaagtatgagggcaaaaggcagggtctctgccttccaagaacaaagggtggagagcaaagtaactttttttttttttgagacggagtttcacttgtcacccaagctagagtgcaagtggcgcgattcgggtcactgcaaactccaacctccaggttcaagcgattctcctgcctccgcctcctgagtagctgggattacacgtgtccaccaccatacctagataatttttgtattttttagagacagggtttcaccatgctggctaagctggtctcaaactcctagcctcaggtgatccacccacctcggcctctcaaagtgctgggattgcaggcatgagccactgagccaggccaggagcaaagtaacttatcaaaaccaaggaccatccccctaaaaataccccccagtcaattggagattcgtttgattaacaaactactttattcaaaagaaactaaaccttgaaagtgtatctcacacctaagaatgactaaatcagagaattaacatgaaaaatatttagttgtcagctgccccattaaaggtccaggactttgggaagacagaacagttctaggacatggtctggccagacatccaaaggtaagtattgaaaaactcaagagatgtaaaagacccttagacacccaaaggaggataagaaactacagacaaaaagaaaagaacaccagctttgttgggggccagcacccacagccatcataagtcctcttctctgtgtcacactgggccattcagttattatccttatttgaggactaaacattttgggccgggcgcggtggctcacacctgtaatcctagcactttgggaggccaaagcgggcggatcacaaggtcaagagatcaagactatcctggccaacatagtgaaaccctgtctctactaaaaatacaaaaattagttgggcatggtggtgtgtgcctgtagtcccagctactcaggaggctgaggcaggagaattgcttgaacccaggaggcggaggttgcagtgagccgatatcgcaccactgcactccagcctggcaacagagcgagattccatctaaaaaaaaaaattaaaaattaaaaaatacttttggttctggctagcataatttggcttcctagtttaaagcaaactgcattacaatatgataagtaagaaaaaaatatggccgcattgtccaaaaattgaattctatgtacttgaaatattttatttaaaaaagtgaaataggatgcgtataaatgttttgaaatatatgtggtgagaacaggcacaaaaactttagttatatttatgtatctttcaattttacattaaaaatatgagtatgaattagatctatgtaatatcaaaaacagtatattaatggaatctgttttagacaaaaaaaaagtagtagcaactgctcagttgtgcttcctaaatgccaggcatgttcctaagagtttaccacaaataaacataaccatcctaataaccctttttatggatgtggaaagtgaagaaaattattgaagttgaccaggtgcggtgactcatgcctgtaatcccagcattttggaaggccgagatgaaggattgcttgagcccaggagttcaagaccagcctgggcaacatggcaaaatccccatctctacaaaaaataaaaataataaataataagattatgtaagctcacataattaacattttaagtggcctggtctcagcctgtgccagcagctatgctcatgttgaagtcactgtctaagtcaagggaatgctttccctataaccatataaatatcatcccaattatttatgtatctcccttctctctcttgctaaactgtgggaacctcagatataggcaatgtagtattacccacgtatttgtgttcccagccccaggaacttaaaaatgatacagaaacaaagggaatcttcatgagcccccacaattctcatgtcttttcctaatctagatagaaataaagaagtctcagccaggtgtggtggctcatgcctgtaatcccagcactttggggggccgaggtgggcggaccacctgaggtcaggagttcgagaccagcctggccaacatggtgaaaccctgtctctactaaaactacaaaaattagccaggtgtggtggtgtgcgcctgtagtcccagctactcagcaggctgaggcagggaattgcttgaacccaggaggcagaggttgcagtgagctgagatcgtgccactgcactccagcctgggtgacagagcaagactccgtctcaaaaaatacataaataaaaataaaatttaaaaaataagtctctagtctttgaaagaaacttattcacaattataaaaataaagagttaaaaaattgaaaatgcatatgcttacttagttcaaaataattatacatgttcataatggggaaaaatccaaattcataaacgttttgatttagttaacataatttaaatacctgtggtctgagtatatgtctatgcttcagaaacaacgtgccaataaatattccacacctaggggtgggaaagtgttttacttcccattaggttgcagatgtcttagaaacacattcctgcaccacagcttcaagaaatccaaataatgacctgatctgctggtttccaagctaccctaccaggagcaagtcagaggccctgcagggctcctcggtaagccctcgaaatccctctcccctcaatgaccccaccacagcagctccacttttgaatattttaccagtgcgtgttccaggtaagatttcctttcacaaaaggttttcgtgggtaaggaaaaatgaaaacttgctgaattactctaagcccctctctccagttgtttttataatggaaccacctgttgatttccaggcttgctcgaaaagaaaacactgctataaatgcatagagcgtcttcccttctgaaaaggaaacttgtgctagaggttacagaaaacagcaagaatgggattgcaaagaataaaggtggctgactaactctagacttcctaactgaggacttacatcaggaccagaacaaattaggtctaaatctacagtgggctccagggtggaaatggaggtctcacttaagaagcaggagaaatctcaaaactcagagcctagaatttaaccccagggcctccgtgttagcatcagcggctgcagagccaggatcaggacttctcaaatcctgacatatagacagggaggctgagaacacctgtcaaccaaaaacacatgattccagcagtgaatccctgggatcaagctcttcagcaagcagtgtgctggttcaccctaagaaggacttccagaaaacgggtagtggcctaggctgactgctggaaaccacgattctcatgggaacaaattaaaaattcagcaactgctgtgttctctttagagaatggagtgaagcgtgctttctcatgaaaaagcagcgggaggaaacttttccccgaaaggaatacagcaaaaggaccaaatgagagtcattatgtgcagaaaaatcccttgtcaagagaaatgcacaaatgaggaagtattaggaatctgcctggttttaaataaaaacacaccttcccatccttggaagggagaaaaccataattattcctgtggcaaaagggctgtggggacaatgcaggttgtcctgaacctgtgtgaacacctggtgaactagtttaccctgtctggcactcactcagccttggcccaggagccaaagagctgggatcaaaaccaactattgccaaagagccaaaggaaagacaaccaaggaataggatgctttaaaacaggacctgtaagtaaataatacaaagaagagcagtgtcaaaaagcagacttccttttcttctcatcatccatgatttatgaatttatggatcaaataatgtaaaatatatccagaatattaatcacccaccacactcatgatgctgaagtagtgacaatatctacacagaccaaaaaaaaaaaaaaaaacatttcaccaattagcagcagccaatgaggcccattatttcctgaggcaagtctttttcaagaaaagaagacagctttcccttggttctgtgaaagctatctctgagtagcattcttccccatgaaaagtaaataattccaccgtgaaagtccaagaaaagtagtgtttggccagttgtacttctccaggggatgaggagctcacctttgagcttgcatcccaaattgctaggtgggagagaattgcatttgtttctaatctcttgaggcttcagcaccccaagactagagagtagaaaacctcagtggtcctccaggcaaagtgggcccgggggttcagaacgctcgctcaccatgtctgaaaagcatgcagagagatcatagtactttgacttctgatataaccttctggggtgtttatgtacttattttttttgagacggagcctcgctctgtcatcaggctggagtgtggtggcgtgatatcggctcactgcaacttctgactccctggttcaagcgattctcctgcctcagcctcctgagtagctggggttacaggcacatgccaccatgcccagctaatttttgtacttttagtagagacggggtttcaccatgttggccaggatggtcttgatctcctgacctcgtggtctgcctgcctcggccttccaaagtgctgggattacaggcatgagccaccgcgcccggccaggaataaaaaaatctaaatagaattttaaataaaacctctctctgaattactgaggattcttagaaaaaaaaaacactatattcgttgtagtaacaacatataataatcaaagtcttgaattgatttgagctcagttatgacaatgtgctacatccatccacacacatacaaaattagaagtgcttgaaaaccaagacaaggaaccctgtggttttctggatcaacaccaggaacgatcccctccagccctccctgggctctgctttctcccttgccctctttgctggttgaatattgctggcgccacccagtggcccccatgacccctgcttcagtgccacagaaggcccagaaggctcaatgctaccagccctgccttaagtaccagggtgacatgactgctcccttactgagccagaccacctgcctggatcttgacatgcatggtctcctttcattctcaccacagcccaggacataggagggtctgaacccatttcacagatgggaacagagaggcttcaagttaggttgagattttacttacagtcccaaagctagggcagcactggggctgggcttccaacccttcctctgactcagctgcacacaccatccttactaagaggacagcagccccttgcctgcttttgcatttgcataactctctgaacccaagcttataaataaccaagccacatgttctatagctattcccaaagacacagcttgattccagacaaataactaagatataattttctgctcaccttccaacacatcttggacttcaagagagatgatgtctttcaagcacttacataaattctgggctgtggcaaggctctgatccttttcttgccacttcttcagcatcctaaacttgcagatggtaacatcttctgccctcttccagatatcatcagttttgataactccaactccagattggcagtggcaggttttgttttgttttgttttgtttgcaatggcacaatctcagctcactacaacctccgcctcccgggttcaagcgattctcctaactcaacctcccaaatagctaggattacaggcgcctgccaccatgcccagctaatttttgtatttttagtggagacagggttttgccatattggccaggctggcctcgaactcctgacctcatgatccgcccgccttggcctcccaaaatgctgggattacaggagtgagccaccgcacccagctggcagtggcagtttttatccactctttcctcaagtcgccagcaagggtaatcaaaaaactgagtaactgttaagggggtttcgtctttgcttcatctaaacacagatgatgaattcagtagttcctctgaacatttcaatcattaatagatacttacaatgaaaatatactctccttattaaaaaaagtatagcattaattgttacttctctcacttttaaaatatatttaaatgttccccaatcactgttttccaatcaattttaaggactaaatggtaccatttcatataacataccactgttagagtgtaatgttcattcacagtgatagttccaataataagactgttttgaagacagcacaaattaggttggaattttgaaaaattcagacatcaaaaataattcaagtggcttaaaaagagaaagatacagttttggtcttacacacctgtctttatctaaatgttagtggcacaccaagacacttagtgacctcagtgaccactaaggagaaaagcaagagatctgagctctcatctccattatgccacttcctggttttagggggaaatgcacatttcaaaaaaaagcctcatgggatggtaatatctgttttatatctgatttgtaatgtctgctaatttcttagaaagtgtcatacacttagaaggtgtgatttttgtgaaatatacatttggtcttccttatcttttcctggcataaagctcctaaaatccttggaatctaaggagtgtttagagtgtatacgctaattatatagcataattatatattagcatataaaggagtgtatgctaactatattactagatagcatatataatatagcatgtaattatagatatatatattatattattatataacataataatatatactatataattagcatataatcctttatatgttaatgaggtgactggtagctgagggcccctggatagcttcaggttaggagtgggtcacagtaaaaaccaaggctggattggaaagttaggattttcagctccaccccataaccagcagatagggaggagggctgaaaatggagttgatcactaacggccagtgatgtaatcaatcatgcctacaaattaaagcttctataaaaccaaaaggacagggttcagagaggttccaggtttgcaaatacatccacatgctgggagtgtgtgcaccctaactccacagggacaggagctccagtgctgggaccattccagatagctccctgagtatctttccatctggctgttcatctgcatcctttattatatctctaactaataaaccagtaaatgtaagtaaagtattgccctgagctctgtgagccactgtaacaa

SEQ ID NO: 1226 - DNA, 1494 bp, Homo sapiens
ctggaggcggcggggccgtcccggaacggctgcggccgggcaccccgggagttaatccgaaagcgccgcaagccccgcgggccggccgcaccgcacgtgtcaccgagaagctgatgtagagagagacacagaaggagacagaaagcaagagaccagagtcccgggaaagtcctgccgcgcctcgggacaattataaaaatgtggccccctgggtcagcctcccagccaccgccctcacctgccgcggccacaggtctgcatccagcggctcgccctgtgtccctgcagtgccggctcagcatgtgtccagcgcgcagcctcctccttgtggctaccctggtcctcctggaccacctcagtttggccagaaacctccccgtggccactccagacccaggaatgttcccatgccttcaccactcccaaaacctgctgagggccgtcagcaacatgctccagaaggccagacaaactctagaattttacccttgcacttctgaagagattgatcatgaagatatcacaaaagataaaaccagcacagtggaggcctgtttaccattggaattaaccaagaatgagagttgcctaaattccagagagacctctttcataactgtaagtcaaaaaatgaaaagtttcagcctgtatgatgaattcatatcactgatgtctgattattttttcctctagaatgggagttgcctggcctccagaaagacctcttttatgatggccctgtgccttagtagtatttatgaagacttgaagatgtaccaggtggagttcaagaccatgaatgcaaagcttctgatggatcctaagaggcagatctttctagatcaaaacatgctggcagttattgatgagctgatgcaggccctgaatttcaacagtgagactgtgccacaaaaatcctcccttgaagaaccggatttttataaaactaaaatcaagctctgcatacttcttcatgctttcagaattcgggcagtgactattgatagagtgatgagctatctgaatgcttcctaaaaagcgaggtccctccaaaccgttgtcatttttataaaactttgaaatgaggaaactttgataggatgtggattaagaactagggagggggaaagaaggatgggactattacatccacatgatacctctgatcaagtatttttgacatttactgtggataaattgtttttaagttttcatgaatgaattgctaagaagggaaaatatccatcctgaaggtgtttttcattcactttaatagaagggcaaatatttataagctatttctgtaccaaagtgtttgtggaaacaaacatgtaagcataacttattttaaaatatttatttatataacttggtaatcatgaaagcatctgagctaacttatatttatttatgttatatttattaaattatttatcaagtgtatttgaaaaatatttttaagtgttctaaaaataaaagtattgaattaaagtg

SEQ ID NO: 1227 - protein, 164 aa, Homo sapiens
MWPPGSASQPPPSPAAATGLHPAARPVSLQCRLSMCPARSLLLVATLVLLDHLSLARNLPVATPDPGMFPCLHHSQNLLRAVSNMLQKARQTLEFYPCTSEEIDHEDITKDKTSTVEACLPLELTKNESCLNSRETSFITVSQKMKSFSLYDEFISLMSDYFFL

SEQ ID NO: 1228 - DNA, 27383 bp, Mus musculus
  misc_feature (1)...(27383): n = A,T,C or G
tgaggttaaagatgtgtgccaccacatccagcctcctgcacacaatacaactacaatccttcctctttccgctccccctcccccagatacctaggagcactctgtacacaccagtgatgactctgatggaagtactcacgtctgtaactgcctcccaaagagctgtgtgaccctttgccatcaccctccctgccagttctactcctggcccaatctcagtcagccactgagccatctcttgtcattacagattagactgatctattctacagccaagtccccttttcctgtggggcaatagatgtctgacaccagccctccctcacccccctaaccccctgccttgccatcttctagtcttatagaacattccagtgtgtcctgacacacagggatcatgtctatcaggggagggttctgctgaaacaggagactgtgagacggagtgaggcttcgggggagggtcgtgagtttgtcctcagcctagcagagaggggttggcatagaaggtgactaagcgtagcctacagttggagaaatttcacttcaagctgtgcaaggggtttggttccttctgatgctgaccgattaagccctgggtcttcaaccttgatctctttgttttggggtgctctcacccagggcagaacttagcttgttctggcttcctgcaggagtgggttgctgtccaaggaggggctatagcaagtcacttactgagaacctgacagcttgtgtactcgctggggtcagagatcaccgagtagtcaggagtgacggccagacaggctgaggaagtttccaagttgactcattggaaagatgttgtcctcagacagagctgaaagcctagtacaagccagcaaaggggcaaacagccaaagtcactctctggccagtcccatgcaaggtggtggcaccttccatgtggactgaaaagtgacacatggaaacaaacagctgccgtgggaacttcccaacagaggtgacacgagaaagctcctgctgccccagctcctgccagcaggagcaccacgtgccacactgtggagggaatagctgccaccctcagcaagcacagtcacacaagcatgacgctccctctggggagcgtggcagggtttgagtgggacctaccaggacagtggaaggcccgcgtgtcagtaagcagtggagagaacccactgggttgcaacttgctactatgggttgttctaagagccactatgaaacagctcatggaaagtctctctgtgtgccagacctgccagccaccaagcactttaaaacaaaatctcacttaatactaaacacgggcagtatattcttttttcctaggggaggaagtggacgcctgtgacttacccagggtcaggggtatactgggatggggatttgcattgctgaaagtccgtctctaaggcccatgctctgcccgggtaaggcctaaagacaccagtgactggagagctggtgctacacgttccccctgtcttcacccacctctgtctcctttccagccccattctgagaaatagccacacttgcttgaagctctcacctcctcctcttaatggaatcccctccgaatcctgtttcctcatgcatctcctgggtctctctgtggcttcctccctccttatctacagcttggctttcccaacccaaagggaatccctacaactgagcctgcaggtgcaggcctgcagcctcagggctccctgggattcccctttatcctcaggttaggtagggaataccctatctctcagccactgtaagtgccccgagcctgactgctctctaggcggcagctcttggtcaccaggttaggttgggaaatggccttacagaccaggacaggttgagatgagcctcctttgcactgactgaaccgtaagcggggccacttccttcaggacaccagccagtcatttgcctctctgactgagcgcctgtcttgcccttccctcttctgcctggaggagtcagggagcttccagctctccggcccttcacatggtgattcaggggtacacagttaaaccctgggctcattctccacagcctgaactgaaggaactgtacccagatctgggccccgatttgcagcttcttgacaattcattcttcaggaaattccaagcactgaaatgtgacctgctaaaacggaactctgtgtccttcctgcaaaccctgatcaggcttagatcacacacacacacacacacacacacacacacacacacacacacacactgtatgcacgagacctccatcctggcagaccctcatacccactacctactccctctctgatggtccaggttcgggcttgtcagtgaccaaacttgatctgggtctcccttgaagcaagaaaagaactcactggagggaaatggaagctttagcagttcacagaccggaaggaaaggatcagccctaacctgcctgagggatagaactcaaaaaacagagtgcagccacaagtgaaatcaggaccatgactgactgctgagaagtgaattcttagctcagtgactgagcgatggattgagcttgtctggtgcatcgggagtcctgggggaggggggggggagtgtatgattgcctgggcattgggagactagacctgggcaatcaactagtgattcttaattttcctaacagtgcctaccaccacagctcctgatgctgaaagaacggctcacctctttaccacatgtacacacacgtgtgtacacacacacacacatacacgcgcacacacatcccaaagagactgtttctgaaatggtctcatgtctattcctagtgggctgccccaggcctcagtatttctctcgaggaatgggtaatgcagggctctcaagctattgtcttgttacacactctggctttactactttctaactgtgtgttgtcaggaacactgccagcttctctgtgcttctatacgcaaaatgaagacaccagtatagcctagctcctacgctgattttaatagtgaaggaagggccttattgaacacaaagggcttcaagtgagcccgggctgaaaaatgcttccatacacatgagctaacactgttattattccccagacactggccactatccttcaaacctctcccagttctgtttcccttttgcctagggaaacagtcaaatccatcctgtaggcttgtttctgaggccagcctggggtggcctgagggctccttctccagtccaatttaaaatgtcccagctcaactggggctggataggtggctcagtggttaagagcacttgttgttgcaaaggactcaggcttgattcccagcacccacgaggcttaccttaccacctccttgggcactgtgctcccatgcatgcaccatacataataaaattaatctaaaaatattattttaaaatgccccagcatatttcagctcagactcctttcacaggaggaccatcccagagtctgtttggcacattccctgacagagacacacacacacacatacacacacacaccccgctgttcacttaaccttgtgttctactgtatccttctgctccaacctctctgagtagttctggtccctaccttgtgccaccccagctgtgtctcccgcctatgtctcttgtattatccccaccattaggaagtccatccacactcctgtttaacagcttgcacagaccagtgtccagcatactgttagtgctaaggccataagcaggctagggacagacaaccagagaggaggcaggaagaacagacaggggagagacaagcatggctccatgggacagacactctccccatctcccccacacacaccctccccccattcccgcaggtgccagaccagacagtggagctgctagagtccctctggttatgtgctgttctttcccatggcaccacctttcacaagctttcctgccacccactgtctgccagactgtgaccctgatctcttgttgccatggccctaggggatctgtcacatccttacaatacaacaactcttcatgctcgtgagcctacccctcccaccatacagtgttctagagactccctcttctccgggagaagtatccaatcagcctggaaaggctaggaccacacgctgctagaggaagcctcctcgcccaggcatgccaccggccttcttccagtcaacagtttattcagttcctgtttttccaggaagagagcattcttgcctccgtttcacaagcagggtctgaggagacaaaagcagccatcgaggttcagaataaataactttcttcagtttccacagccaagacacaaactcggactccttggcaccatcttctgactcacgtggccttgccaggtgccctctgaatcacggttggtctctgagtaggttcctaatgcacaggtgagcactatcaggacctccgcccacttcagctgaaggccaggctggctcaagctctggggacagagtctcagaacccatggcaagaaggtcctcctgtcctaggacctcctatccaagcctgctctttcttctgcatacccacaatgctctggttctggggcagagaccctgctctattcctttccttctctgaacacaggctctctgttttctcgtggcagctttctcaaggcacttggaggcctttctttcactcctgggaccttggatatgggcagtgggcagaaatagctccttagggcataagctccacctggggctaagacccaaatagcacctttcctatctgcacctcattctccttaattgcacaggagctctgcctgaagcagtgtttgtggtgtccccaaaagacccaagacatcaaaggcacaggtgaacaataccatcataaacaaatataagagctacagcaaatataagagcttccaccctggcctcctgagcatcaagccgtaacctctcagggtgtttgccagagcttgtgcatttcagaggcagcttccctgagtgatgttctctgctcttccaaactttccacagtgatcatcttagccataattggaaaaatattatatggttgctcacacctgcaagcccagcctcctcagagaatgaaacaggagggctgaaagttcaaagttagtctgggctacataaagtcaagggcagcttgggcaatctggcaagatccttggcctcaaacaaaatagcaaaaagggccggtggtagaaagctcgccaggtatgtacacgagaggctttggtccagcactgaacagctgaggccagcctgaagcctgcaccaagccctgggagagagtgtgttctggggacccttgccacctttccttcccatggtccctgaagcttgaaggtgttgtgtgactcctcctcagaaggggtgagcacctagtcataccagactgagcggcactggcagtcctgtgcggtgaaccaaggacttacaggagcgtgataaagggttaggagacagagggtaaccccaaaacaactgcatcaccaaaacaagcaaacaaaaaccagaaaacaacaccccagcatgagaaatcacctcaccaaagtcccttttttagttagctttctctctcctataatcgctaacatgcaatgcatgcacgcaagcacacacacataaagaccagagaccataagcgatggcaggattacatacactgagggtggagggcatacaggaatccccgggtctcacatgaggagttaatgagcctgcctccacctcccaacttcctacaggggagactaatatccctgatcctgtcagagggccttgtggatacggttagccactctgatttcaagaaggtaaacgaccatccgcctgcctctgcctcccaagtgctggaagcaggctaatttctgagtttgaggccaacctggtctacagagtgagttccaggacagccagggctacacagagaaatcctgtctcgaagggggaaaaaaaaagaaaacagaaaaaaaaaaaaaaaaaaaagacaactctgtgggctggagagatggatcagaggttaagagcactgactgctcttccaaaagtcctgagttcaattcccagcaaccacatggtcgctcacaaccatctgcaatgggatctgatgccttcttctggtatttctgaagacagctatagtgtactcatacatataaaataaataaataaattttaaataaattttaaaaaaagttaaaaaaaaaagacagctctgagtgcggtccccagctgggcgcccatgcactaatgcagccttctcaggcatggtgtccgggtccttcacaacatgatccctacaccagcgcctgtctcctctcctaccatgccaccagattaggaggctgtggtaagtggacggtgagtttaaagccagcccatggacaccagggaacgtagaccagtattagagggtttgtctccaatgatgggattagaatcctggtcctctggatgggcagccagtgattttaactgctatgctttgtctccagccccttaactcatgcctgtaatcccagcattcaggaggcagaggaagacagatctctgtgagtttgaggccagcctggtttatctaatgagttccagaacagccagggctacatattaatgataccctatcttaaaaaacaaacaaacgagccaggcgtggtggcgcacgcctttaatcccagcactcgggaggcagaggcaggcggatttctgagttccaggccagcctggtctacaaagtgagttccaggacagccagggctacacagagaaaccctgtcttgaaaaacaaaaaaaacaaaaacaaaccaaaaaaacaaacaaacaaacaaacaaacaaaaccccagcaagacaacaccctcattagaagctcgtttctttacccccctgtatgtgcacacatttactctgtgtacagatggtgagagactgtagactttacttttctaaattaccttcagagtgaggcagaaacgctccaaattcagggcccactgttctactgcctcatccaaggacccagagatgccctggggtctgaagcatccagtcaggctgctgagtgttggtggctgctctagtctggaaaagttgccttcggctaggcagtactctctgtgggaacaggatcgccccacccctacccagcacacccagagttaaccctacccccaaaaaattcccagaagaaattcacagatgggttttccccagacagacagctcatacatatttgccacttagcacagatgtttgcctggggatggagtgctgagagacaacgcaggtacacaactttagggtaacaggtagccccaaacaaagccagacacgccggggcgagctagaactgagatgcccaggaggcctagattttattctgtgttctgaagtccttcctattgtctgtgtccgcatctcacagagccggaaactctcctctctgcccaccaggcggcgcagcggttccaggagcactgcgaatgtgttgcgggactgagtctcagcacttagcaagattgttttgccaaacttatttcctttactactcaagtccaggaaaacatgtgcccaaacgtaagttcactatcgacttcaggactcccggagggagaagactttatcttagcctcatccttgcggcctaaggtgcaatatccagccaaggggtagcctaaacagatgagctacctctaaaagcgcaaaaacatggataggatcaaggcctgaagtgaaaatgctggagatcatcctaagccagaggctctgcgtccagtcagtgcccaggtttcagccaccctctccatccagtttgctccagcctcacactcaggcaggcaggaggtgggcacgtcctccctaggctgagcggagggagattggctgccagcagaggtgatccggaccaaagccatcttccccgggggcaattttgggctattttctctaaagatgttacactatctaactcctctttgagtttcacagcagccacaagtttgcacctttagagtgagtgatattactcaacaatgaccggctactgttattgcttgcgccgggcactaagcagagaacagaaccaaaccctatgaagtaaaggaaccctcgtggtgtgtgtgggagactttcaccttggtgttcctccaggtgagcaaaaagcgcgtgaggtgcttccctagggcagcggataaacttcgaacccggaaggagggacgagccgcacgcatgggactcaggcacgtcgcctagggcaggttgcgcaccggtggcgtatgcttgagtaaagacggaccctgaccctagtgcggggttacggggcgcggcacctagttggagctcagtaaatatttatggtgagagcgacaagcagggcccacctcctaggagggaaggaggaaagccagagccctcctcaattcctggctcctcccctgcaggctcagcaccgagctggccacggcgtcctggcccgatgtaattacagggtctgccgccaagcctggccgtaaaaaaccgggatgaaacggcctggaagcctcggaagctgggccggaccctgcaaagagccccgggtccgcgccttgccctgatgcgcagccgcaaagaagagagaccagggacagaaacccccgcccatcacaccctgcaacgcacacgggctcaccgccacacacgcaaactaccaagcactcagcttttgactttacggctccaagaatgcactcgagcctaatcaaacacctgcccgccagctccatctcaggcgcagacgccgccaacccctctccagacagctgctgattcgagaggtgaattcctgcagggttgtttacatggagagggggaggggttctgagcctggtactgagagcccaccgactggaagacccaagtcagactcagtcaaacacagccgcccaaactaccccccactccaatccacccccgctgcacgcccaaacacgtttctcctcttcttcacacactgttcacaaacattagcatatgtatgtcaggcgtttcacacgcttccacacacaagtgtctttacacctacccgccatcacacgcatttacacacgccatatgtacatgtgtcaggtcggttagtttgtcactcttcatgaccatattcccacattccatctgcaagcgcgcattcgctcaagacacacgtgaaatgtataaacaggtcattagcgtacgttggcgctattgaaaatattaggaacatccccccctacagcccctgagcccaactatgagttctcgcataaagtactgatggactgagtagcccttagccctggccgcacacgttacacgctcgatcacacacaacgtcgcactttattcccggcatctaagcgatgacacaatctcttgaacaaagacaacattgacaaacccaacaaaaacaaacagccgcgtctgtgtggggaggggcagccaagccagagtcaaggcatgggggagtgttgctgggggggcggggggaggagggggtcacgagagagtgtgagaaggcgagtgcgcgggcctgggtgtgaatctcaggaaaggtgtggttatatccccccacctcacaccctgacaagattggcgccccgcgctgcaaagccaagtcctgaagccactggttcccagacccacacgtataagttcttccatttttccagcttgctatggctttcagtcccacaaagccaacagagcctcacatagacacccccacccccacacccgtaagtgagcacacacagctatgggaggatctgtgcagaccccggagcgctctccgtcgctgagatatgggagtccttcctcccagagtctttttcccttcctccacctccaacgtagccatcaagccctggggcagcgcgcgtcgggcggggcgagggcggggctggtgttggcggcgccagcccaaaaggcggagtcgagcagcgaagaggccagatttgtgatcgtggtgcctactgtaccgtggagaagcctgtgggaaccttacactgcagagctctcgtcctggcctggctcggcccggccccgcgctatggagttcctttgggcccctctcttgggtctgtgctgcagtctggccgctgctgaccgccacatcgtcttctggaacagttcaaatcccaagtaagccctgagactccctggcagcctgggtgccgggttggcaatggcctttcgcagggtaactgtccctgccaacccctggcctgcgcctaggagaggtggccagggatgggttggactctatagctccccacctccgtctgtatctccccttactacctggcaacagccgaccagggcagaaacctgctcatgcctgctcgcacaggcgctggctgtttcagccctctctttctgccctctggcatctcatcactctaaagtaaggctctcctgctgggcactcctgccttgagaattggaacgttggccctggcctccggggctctctaagtccccccatgaaacttctgtgcactctcatttttgtgtgccacttgggcgtttgtatactaacaggcacctatggacgtcaagagtaagcacagcgctcagggagccttggaaagaacctccgtaggaatctaggttttgggcattagatattcattctgtgtttaagatgaccctgaagagtgcctccaaggttggggggggcataaattaggcacatgctgtgtatgggtcgaccgagggagtggctgaggtggtcacactaagggactggtaagaggagtgtcgctgggaagcttggggaggagcagagtggggcttcacagggctacaaaggctgtaacaggaaggaggtaatttctccggagcaggttttagggctatgaagcaaatggtattgagaggaagacactgtcgggccctttgttcttgcccttgagtttcttcaagttatgagaagagtgttagggccaaacctaagagggggatatggtggaacaagaagaggtgagaagtcgaggccacagaatgccactaaacccctccctcccagatccagtgagcctgcctccccttcccctgagagagatgctgggccagtttcctctggcactgcctattgagggtctgttgtctagggcatgtcggagggcaagatagagccagctgccaccctaaaggcactgtcttcctggccctggagtgctgctgcgccccaccagcccttgcgcctgcccttgcgcctgccccttgccttcctgacctagtcctgccctagtagtgggaaagagcaaagtccctgtttatgcccatgccaggtgtcggctgaaggaggaggaggggacgggaagtcatgagtagggaggggggaaccctggccttttccgttcccaagctcccaggtttcctctctttcaggaaggagcctcttccttgcccccctccctgtctactccaccactaatagagcccccttttccaaatggagacttaagtgtcacaggcaggttaagtgtaggagatagtacgctaagtatagcttcagccctggccctctggacacacacataaccctgtcttatttacagccacaggaaagccagtctagagtggaggtcatgggcggtctagccaggcccagcttgggggaagagatgaggtggcaatgaacagggcgggtgtagggttgcataggtgactcagggtagtgggcattaatcctgggctcaccaggctccaggcaaaggcagtggcagagaaaggtgccactgtgagctaggccctggtcctggagagacagatactcagctatcagatttctctgccgcttttgcccggaggccaacactggggcaaaccagtcctgggctgccctggggtcctgggggctgctcacttttgacgaggtaaaatttcacaggctctcaagagcgcctgggcgggtagcgaggtggatgaggcacgagtgagtcagtgcccatcacgggaataggggaaagacgccaggcccagagctgaaatacctgttctgaaatggcttctatgtttatctctccagagaggaattttaaaagcctccctctgcttctctctctctaccccccccccgtgggggaggggcccagaaagtctcattttagaggctgcaagcagttgcaaggccaggcctctaaggggtcatgatgactgggtagtgggtggccaccgtggaaccccaccatcaccatgggcaccacccatgccaaggactcgggttgaaagcaagttggcaggcagctctgctgagcctctccctggcagagcttgggggaattcagagaagctgcctggctttcagtgggaggggggaagcactttcctgctgctgagaccctacccaggctggagccaggtgtctggagctcagtgggaggggccggtgggcagtcaggctggagcctgcagggcttggggggaccaacgggggagaggaactggctccacctggggaggagggaagagctggggcagcctcaggtctaagaaccacagcgtttcatcaggggaaggcgaaattgttactcttggagataaaatcacagagattttcaggagtgagaaagtggaacgaggagatcaggacacaaatccgagtaacaggaaagggaggtttgagggacactgagagagtttgattatctgtgaatctgttggtctaggcattgggatgctgaagtacactgggaatctgagggagactcagtgtgaggggcgggatgggataagacagggatgtgacagggctcagaaggatgggaaggagaaagagacctgggctcctaagcacagaccagcccagagtgcagtctatccaccagcatttaaagaagtccccggggaacagtcgtcagtagaatacagaggaaagtgggctatggaaatgtttagaagcccttgctcgggcgaatgcctggagagttctagaaggcacttcgttacccgagagactcttggtggatgttatttggataatgagtaagagatcggtagtgagggaatgaagaagtcaagatcagtaaatgcaggagttgaggttctggaaagcctttgggactccagtgtgagaagtgaaggacaatgtaatgcattggaagttcaaggctctgggctgacttctgactgactggcttcctcctgctttgcccgggctcaggttccgtgaggaggactacacggtgcacgtgcagctgaatgactacctagacatcatctgcccacattacgaggacgactctgtggcagatgcagccatggagcgatacacactgtacatggtggaacaccaggagtatgtggcatgccaaccccagtccaaggaccaggtccgttggaattgcaaccggcccagtgccaagcatggcccggagaagctgtctgagaaattccagcgcttcacgccttttatcttgggcaaggagttcaaggaaggacacagctactactacatctgtgagtgcacaagggccaggcctcagagcactggtggcctcatgcttagtggggagtcaagtagccgagagcttccccttcagagtctaaactcagttttctcccattcgcatcagggatgtggtgtgagcttcaggtgtcttaggcactctgtttggtaaatgggaacaaaggtcaaaaacactcctagcccctgtccttgaggaagctgggaaggatcccgaataaatcagcagggcaggagagcagtgtatgatagacatgaacaccagacattgggaaaatgtatatgagagccctgtcttcagacacaccagaagagggcatcagatgccattacaggtggttgcgagccaccatgtggttgctgagatttgaactcaggaccattggaagagaagcctgtgctcttaactgctgagccatctctccagccctgacacttgggaaaatgacccatgtgcctgcccgaggtcaaagacagaaaaggccaagtgggtccaagacagaaaaggcggagtccagaatgactggaacaggagggcacacgcacaaagggagggtgacagctcctggaaagagagtacaggaaatagagagctgtgctcactcagaaagtgggtcggacagcttcttcaggcccagatactagtaagagttcagactttgtcctgagggcagcagaaacctgttgatgtatcccgagaccgagcaggccaggggctttgtgaagaccagatctgggccttagtcttctggctgagtctagttcagcatggtagaaaatggtccagggaaagggggcttacacatgaacacctcacccaacttcaggtggggggtgtgagatgggctgtgtgaaggggacagtgtccacggccctgtcactccactgttaaagctgagcgttgttgcagagaaagggagatggggctgcgcactggtcagaacgtaggtaacaactgaaaataaatgccacgggtagctagctaggcgtgggctcacctgtaatcctggcaccaagtttcaggtcagtgtgcgctagagcaagaccgtgcctaaaatggatttaataggaatgtccatcagtgaagagcactggtcgattcctagccccacatagcaatgacaagtctaatagatctcccgttccagaggatccagtgtccttttctgacctctgcaggcaataggtacacagcacagtactcagacaaagcaatcaaatgcaaaaagttaattttaaaacattttaaagatttatgtattatatatatatatataccattgctgtcttctgacacacaagaagagggcatcggatcacaacggatggtggtgagccaccatgtggttgctgggaattgaactcaggacctctggaagagcagtccgtgctcttaactgctgagtcatctctccagcccctttaaaaacatttttttttaagatgtatttattgctgagcagtggtggcgcatgcctttaatcccagcacttgggaggcagaggcaggtggatttctgagttcgaggccagcctggtcttcagagtgagttccagtacagccagggctacatagagaaaccctgtctcgaaaaaaaaaaaagatttatttaatttatataagtacaccaaagctatcttcagacactccagaagaggctatcagatcccattacagatggttgtgagtcaccatgtggttgctgggaattgaactcaggacctctggatgaaagttagtgctcttcaccactgagccatttctccagccctaaaaacattttaaagattaaattttaaaatcaaatgcagacaggagaaaggaattgaagtgagcagggacaggtctggtgggacacacctacagccttagccctggggaggccaaagcaaggagagttgggaaggttagtttaaagctaacctgggctaccatattagagaccttgtcacaaaagggaggggggcactggagagatggctcatcggttaagagcactgactgctcttccagaattcctgagttcaattcccagcaaccaaatggtggctcacccatctgtaatgggatctgatgccctcttctggtgtgtctgaagacagcaacagtgtactcatatatattaaataaataaataaataaataaataaataaataaataaaaaccagagagagagagcgcgccagtgagatagctcagcaaataaaaaggcgcttgctgccaacctgacaacttggatttgatccccagctcccatgtgactgaaggagagaatttgctttcccaaattgttctctgacctctaaacatggaacacacacacactgaataaatattttatacagagaaggagggagggagggagagagggagggaggtgatgcttgcctataattccagcactcagaaggtagaggcaggagatcaggaattcaagagcatcctcaactgtacatagcatgttcaaggccagcttgagctttatgagatcctgtcatcccaaaatttaattaagtttttttaaaaaagcagttactgcacaatcctgacaacctaaatcttgtccagagcccacataaaaagccagatgctgttgtgcacatctgtaatcgcagcactctgatagggagatggaaggcagagacaagagacttagccttagtggggtgtgatggtgcacacctttaattccagcacttgggaggcagaagcatgtggaattctgtgagtctgagaccagcttggtctacatagtctgtcccagagcaggctctgtaaagagaccctgcctcaaataaataaataaaaattaagcagggcagccgggtggtggtggcggcacacgcctttaatcccagcacttgggaggcaaaggcaggcagatttctgagtctgaggccagcctggtctacagagtgagttccaggacagccagggctacacagagaaaccctgtctcagaaaaacaaacaaacaaaacacaacaacaacaacaacaaaaacccaaaaaacagggcatcgagtcagacaattttgagctcctatcttagcaaaggctctttccttaccatcctatggatttattttacagccaaacctatctaccatcaggaatcccagtgcttgaagctgaaggtgactgtcaatggcaaaatcagtgagtgtcaggccctgtggaccacttccttccatctgtgctgggcgtggtctagtggtctgggatggggatggaagttgcctctctgtctcctggtgcaaaaagcctgatctacttccattcttatttttcagctcataatccccaggcccatgtcaacccacaggagaagagactccaagcaggtaggtagtagcctgagacagtttggtctgggtcacaggaaggggtttgcttaaagagactgaggagtaaggtggctccctagccacatacgggctggctaaatcctgtgtggctggaagccgatgcaaacacttaccatgtctgtctttgccttctcaccttgcagatgacccggaagtacaggttttgcacagcattggttacagtgccgccccccgcctcttcccactggtctgggcagtattgctcctaccactgctgctgctgcaatctcagtgagggtgtacgcttgccctggcttatggattggaatgggactaaggggcagccccagccctgggaacctctcccactacacccacaagacgccaccatgaagcctcaaaaggttcagtattaagggttttaaccgaaaagagtttaaccagcccaactgtgccatccctgcctccacttcagagggatggagaaagaagtggagaaggtccttaacctgcagtttctgcctttaagccaaagaaacaagctgtgcggacctggcccattaagaggcctcagtgggagaagggctaaaaagagcctgaggtcatgcggttggacactgaacttggtaaagacgtccttccccaaggaagccataatgtgcagatgaactgaccgaaggaaaagcttgagacagcttcctgcgggggagccaggtacagaagaggcagcttgggctgacccagcatctctgcaagatttccacctgctgggctgccagagaggtttgtagcccggccctgactgcatcctccccatccctggggcaacattccctggagctgtgccaacaggaggactgaagcagcctggttttagagtgtagctgtaagggcagtgcccgtgtgtacagtctgtggagtttagcttaacgggcagggcccacatgtacagtgtctgtatataaatgtgctgtatctgttcatttctatgactgcagggtttttttatacagtgtttttggattcataataaattgatggttttttatggacatgcttttctgccccaccatgttgatttgtgaccagtgtccccattgtgtgttaggctctgtgctaaacagaagcaatggggggggggtgtgggggggggcaggtataannnnnnnnnnnnnnnnnnnnggggggggcaggtataatgcagagctccttttgcggctgaggtgggaaggttaaaaacttgagactgcatgagtaactcagaccttgcctcaaactcaaaaataaaaggctggaaatgtaccccaagaagtagagggttacctaacgtgtgtcagccctgagttcagtcctcaggagcacaaaacataagtagccaggcatggtggctcctgcctgtgaccccagcactcagaaggttgaagcaatgttgccaaaattccaatgccagcctgggctacagtgtgagactttgtctcaccaaaacaaaacaaaaaaagtaaataaaagacaaaataaataaatggctaggatcagtcttaccaggctaaaggagtttactcctgagggttctgcacaactccctgcaagagtgggctatagattcctctccgcacccactctttgttcttcctgtccaacttcaccagcctcgagcgctgggctttggcacaccatgcaggtactcatgctgtctgggtgagtcagggagctggatgccagctgaagcatgtgcgctgccccaccagcagagccgcctgggaggctgggagggaaagttcccagcagcaagtatgttggaacagggggccaggggtaggcttgtccttggatagggcaggtcgtgtaagagaggacatctgaaagaggatggcaattcctgcttttgggggacagactggaaagaggtttcaataacctccaggaaaaccctcccaaagctgggtaaccaaggttctgatatgaattgggggcgcgttgaagacctgtgagactaaatttgaggtttgtggtccagcacacaaaagcatacaagaacccagaagttgaggctagtggtctcgatgatgcaaggggtgcgcagtgtgaggaggggtcggatcggggacaaatgcaggggcactactaaaaccactaaacgcaatctgaacagcacgatcaggacccaggcccgcacattacagcaaaccacccggccagcacgcggcgctggtttggctgggtccccagttccggtgaagttcgggcgagggcgggttccggcgcggttccacggggaagggcggagcttcgccttccgcagctccgggtctgagctactggaactccgcgctgggctagggaaccggctccggtgggatggaggcgggcggcgtggcagactctttcctttctagtgcctgcgtgctcttcaccctgggcatgttctccactggcctgtgagagtgtggatggactgggctggggcaggaagtcaagaaatgaaagcgggcaagagacgtggctgcaatatcttgctgcttttggaacccagaataatagtggaataggattggatgatttgaggtccaaggcgaggctgcctcttggcctgaggggggagatctgcttgtcgttcaggatgattggtaaacaccgagaaatcttttacccactcctaacaatttcctttggatcccttccagctcggacctcaggcatatgcagaggacacggagcgtggacaacatccagttcctgccttttctcaccacggatgtcaagtgagagtgttgttggctgtgatgggaaaggctgagggaggtgcaagagatccctggagacctgctgcaaccccagcagccccttggaccttaatcctccttccctcacagcaacctgagctggctgagttacggagtcttgaagggagatgggacccttatcatcgtcaatagcgtgggggccgtgcttcagactctttatatcctggcatatctgcactacagtcctcagaaggtagaggccctcccttgcactcacctccaccccacacctggccatgttggcagagcatatagttctatttcctggaagattagtgggatggcattaattccctttcctagaaggcccttctggttctcctgcccatgaagtcaaccctttaaaatgcacacagagccacccaccctccccttgttcgaaatgctggtggcttacccaaccccgtggtgtcaagatatcctgtgctcccccaacaggctgggggaagagggctatactgtctgatagttcctttagggttaggaccagggccaatggctaagaatggccattcgctctgcttccccactcagtcacactaacatttattggtctcttattgtacatgtatgtgaagctcacatgaaaaggggagggatctaaaaatggctctccccttccctggggatctccagtgttgtgtggctgagatttctctcaaataactgagtggtgagaggctgacgtgaaggccgggataaaagttgatttccccattagagcatggcagaagacaggaggaggcaattccagcagagagatgagtgttctgggtacagatgcatgtaagacgcctctcccctgcagcatggtgtgctcctgcagacggcaaccctgctggctgtccttctcctgggttatggctacttttggcttctggtgccggaccttgaggcccggcttcagcagctaggcctcttctgtagcgtctttaccatcagcatgtacctctccccactggctgatttggtgagtaggggtggccaagaggtaggggagatgcggagaagggctaggctccctgagccagggactggctaatactggggcgggggcggggcccagctcttggaagaagtcaaggtagcagaggtgagtgggatgcaggaaaagggctgaatgaaagacgcaccacagggattgtggtcttttttccgcgaggaaattctctggcgaggactcaggaatggttctatgaacctgaaccaggcacatttttgccgtaggccaagatcgttcagactaaatcaacccagcgcctctccttctccctgaccattgccacgctcttttgctccgcctcttggtctatttacgggtttcgcctccgagacccatacatcacggtaagcagactctagattgggacgttgggtctacaaagcagagtctggtctttctagcagctttttgattgcaggtgcccaaccttccaggaatcctcaccagcttaatccgcctcgggcttttctgcaagtaccctccagagcaagacaggaagtaccgcctcctgcagacctgaccccaggcacccgagtgccaactggataccaaacagagctcctgtttctgctggtccttgtgaccagttccatggatgcaataggttgtgagaaaaagatgactttgaaactaaagggaccaaagatctttccttagatcagataggacctgtgggatgaaatcacatttttacaggagatcatcttttctcatttcggaggctgaggtggtattagaatgtgccttaaaataaactgttccccacccctgcctgcagagtgatgtgttcttcgccattcccaacctgcctgacttgacagacagagggcctactgcctggggggcctgtaggattggctcagaaaagggatttgaaagaactagaagttaggactggagagatggctcagtggttaagagcactgactgctcttcccaaggtcctgagttcaattcccagcaaccacatggtggctcacaaccatctgtaatgggatctaatgccctcttctggtgtgtctgaagatagctacagtgtactcacacacataacataaatattttttgttgtttttttgtttttcaagacagggtttctccgtgtggccctagctgtcctggaactcaccctgtatacccggcaataaatctttaaaaaacaaaaaacaactagaagttagaaagatccaggaagtccttttaaaaagaaaagaaacctggcagtggtgacacacgcctttaatcccaacacttgggaggcagaggtaggcggatttctgagttcgaggccagcctggtctacagagtgagttccaggacagtcaggactgcatggagaaactctgtctcaaaaaacaaacaaacaaaacaaaaaaacaaccaacttgaaagctgtgaagaatggaaggaagttagggacccatgcttcctgcgcagccttgtatgggaagcctcgcagcacttccaaggttgaagctgaagcgggaggaccacaggttgagggcagcctgggtagcacgacagggttggttgtaagccaggttgaactacttattaaaaccatatatattaaaaccatatacacaagtaaacaaacctgttttggggatatagttcagttgtggacttccaagtttgaagcccagcatgacataaactagtctagtcatggtgggtttagcctgtaattagagacgttagaatcgagataatccacagccatatggctggggtcaaggccagtctagggtacatggcatcctatttcaaacagaaaaaaaatcttgagaagggaacagaacaccatcaaaatgcaaagctaagtaaggcctggtaaggtggttctcctgccccctcacctcttgacctctagtatatagaatccccatcccaccccccaccccaccgctatcctccatactcaaaactacacaagattagaaaataaaactgcattttaatgcggaatgaggaaagatgtccagactggaatgggtttaggtgtcagaagcgcagccccctgcgtgctaaatcagctcgggcctccacgatctggctctgcagctctcgggcagcgtcctcgcagtcgtgaaatgtagctacgcgatagcccaccgtgcccagggcatagcagccagcggagaccaacaggtaggcaggcagtggccacaggacctctcggcaggggaaaggcaactccaagcccagtgctcccatggtcagggcagcccaggcagagcccaggagagccagtccccaaagccactgtgttaacttcgtcatgttggctgcagggagaaaaatcaaagctaagggttctttctaccgatccccgctctgcatctgacatttattcccagtctccgccacccatttccgtctttccactctgcccgccacctaagcgtacctccgtgtgccgcgctgacaaggcccgcatcagcatccggaagtccctttctactaccgccctttttccgggctgccttctgggaactgtagttcttaggacaatttcggccgcgctcagatccaggttggttatacactgctcttcgaaaatctgagttcagaagagtttttgccgttttgttctggagacccacatcgataccggctggaacttgtggacaatcggaggataccccgaaacgctgcgttaagatgggaatgttacatcgccccccttaaactagattctccagtgcagaaagcccactcattcaattattcaagcattcttccaacacacccatcaatcagcaaacatgaacaggccgcctcacacctgctaggcaagttctcaaccactgagcccttttatattttgaaacaggattttacagagtacccggaataaacttgaactccagtctgagatcctgtcttgaagaaataggctggtcatgtcaaattgaactgcaaatcacaggcccatatacctgtgattccagggcaattcaacagaagaagaaagaagaccatgaccattacaggatatgataaagggttggttgctaggggatggagaggtggctcagcagttaagagcactggctgctctatcagaagatcctagttcaattctcagcacccacatgacagctcacagctgcctgtaactccagttccagagaatctgacaccctcacacagacatacacgcaggtgaaacatcaatgtgcataaaataaaaaaaaaattttttttaataaaaaggggttggttgcctttaggtagcaataacagtttaaataaaacaagggggttttctttggcttgatttttggtttgtttgggttttaaatctttatttatgtgtgcatatgtgtgtctatctgagcgtatactggatacatttaggtgcctgcagaagccagaaaagctggagttacaggtagttgtgagctgtctgacactggagctaggaaccaaactcaggtcctctggaagagcagcaagcacacttaacagctgagctgtttccagcctggttggtattcgttttgttttgagacagagtctaatgtaatgtattccaggctggcctagagcatgggatgtagctgaggatggccctgaacccttgttactcctgcctctgctttcccagtgctagaattaaatgtgtgtgttaccaaaccttccttaaagcaattctgttgttggaaaaacgagtaaatgaggagtgaaaaagtcctgaggacatccacatgatcccaaggctcaggaggcagggctgctccaagttcaaggccaacatgaactacataaggaaggccctgatttaaagggaaaaaaatctagtctgagtggattgagggtccacttggaaatcacaaagcggggacagaagtagactgtaactccaagacctcacacagactcacgtgcaggctaaacaccagtgcacataaaataaaaattaacaaatgttcaaagacccattgttcaaagctttgtagctggattggaaatttagtttactttggtatgtcaaaagggaatccagaggggctggagaaatggctcagcagttaagagctctggcagctcttctagaggatcctctgagctccattcccagcacccacatgatgtccttaaccatctgtaactccagtttcagagcgtctgacaacactttatgacttcccgaggcaccagacacatactcagacatacatgcaggcaaaacacccatccatgtaaaataaaagagaaacaaaccaaacccttatttcctcaaagccttcaatgttaatcaacaattattatttataaaacaaaaacaaaaaacatgttactgagacaacagacaagagtaaaatgtgccgttttcttttttcccctttctttcctttccctgagacagggtttctctgtgtagccctggctgtcctggacctcttgttctgtagcctaggctagcctgaaactcacagagatcctcctgcctctgcctcctgctgggttcaaaggtgtgcaccaccacatcctggcctcaattaaaaagtcatttattaatttttattttacatgcattggtgttctgcctgcgtgaaagtttgtgtgagggtgtcagagcttggagttacagacaagggtgaactcagccagctctccagcccttcagaatttttaatcataatttaaatttgttttgagagtataattatgctacttttcctcctccatttccttcctccaatccctcccttgctctctctcaatgtatggcctctttttatttttttagatttatattctccgtgtatcaacggtatgcctctatgtatgaattcatcacacgtgtgcctgctacccaaggaggttaaaagagggtgtcagatcccctggaccagagttactgatggttataagcaaagtggcagtgactggacctggatctgttacaagaactgtacatgatcatggttttgttgttgtgatttttttttttcaaaacagagtttctctatatatccttagctgtcctgggacttagtccatataccaggctagtctcgaactcagagatcagtgttcctctgcctctgagtgctgggatgaaaggcatgtgacatcacatgatcttaacatctatatatagagagatttgaggcctcatgagttttcccccttccaggttagcatgtccattatgtctcttagtgtggtggtttagccaatcgtgttgatgagacttcatgcaagtagcttctacatttctagaagatgaaatctcacagctgattcactggttctctctctctctctctctctctctctctctcataatttatttatttttcatttacttgcattggtgttttgcctgcatgtatgtctgtgtgagggagtcaaatcacttggaactggagtttcagacagttgttagctgctatgtgggtgctggaattgaacccctaatctttcattagaagaactgccagtgctctaaaccactgagccatctctccaacccctcaaacatctctcttccttccttccttccttccttccttccttccttccttccttccttccttttttttttttttttaagttttctctctagccttgctttgtggcctgtaccaggctggcctgatgctcaggctcctgggatagcattcaactgaactcttcacattcctcctgagctcattttcacaccaatagcaatgtaaaaattaaatattaaattagctaaaactgccgggcagtggtgctgcatgcctttaatccaggcacttgggaggcagaggcaggtggatttctgagttcaaggcgagaaaaaaaaaaatttagctaacgcttagaatacatttaagtcaaggaggtaaggtaagactgtgtgttaggaaaatgagaatcagtgacaattaaatcttccttctatggcgagtctactaggaggccgtgccagtgggcacaaaggtcatcacctaaatagataaataaataaatgaaatcggaaggaaggaaggaaggaaagaaaaacaatcatatattatttagaaatagagaggaaaatcttaggagcagcagctttgggatgagagacaggagttcagcagaggagggggaggcagagctagttttcattagatacttgtaaaactgacccacttccataactatgtaagtaagttcctttgttaaagacagttccttaaagaagaatgcctgcccgcagtgacaacctccctatgagaacacgcccctcacaaaggttctcctccatccctctccagaaatacaagccgtgcctaaagggaaggccctatggtacgccctggatgtgaaatgcccaggatgcttctaatccccacggtcttgtccacacccaaatgctatcttgcatgttggctgctccagaatctcgtcagcctacagcaggaaaagcaaggctgacagaaggtggggcctcagcctactcaggaaggaggcagacacaggcctggctacaaaacagagcagaattagagcctactgcagcatgttgtgaccattaaacggtacggcgtcccacaggccaagatacacgcaggccgcccagtgaatagttatctttctgccaatgatcattattaaattcttttttatttttgaagggctgaagctgggaggtagaaaaagatgcagagcaccaaggctctgcttattttcttcaagaaaaggaagggccgaagggactggagagatgctccggggttaacagcattggttaagcccagggttctgttcccaacacctacag

SEQ ID NO: 1229 - DNA, 958 bp, Mus musculus
gcctgtgggaaccttacactgcagagctctcgtcctggcctggctcggcccggccccgcgctatggagttcctttgggcccctctcttgggtctgtgctgcagtctggccgctgctgaccgccacatcgtcttctggaacagttcaaatcccaagttccgtgaggaggactacacggtgcacgtgcagctgaatgactacctagacatcatctgcccacattacgaggacgactctgtggcagatgcagccatggagcgatacacactgtacatggtggaacaccaggagtatgtggcatgccaaccccagtccaaggaccaggtccgttggaattgcaaccggcccagtgccaagcatggcccggagaagctgtctgagaaattccagcgcttcacgccttttatcttgggcaaggagttcaaggaaggacacagctactactacatctccaaacctatctaccatcaggaatcccagtgcttgaagctgaaggtgactgtcaatggcaaaatcactcataatccccaggcccatgtcaacccacaggagaagagactccaagcagatgacccggaagtacaggttttgcacagcattggttacagtgccgccccccgcctcttcccactggtctgggcagtattgctcctaccactgctgctgctgcaatctcagtgagggtgtacgcttgccctggcttatggattggaatgggactaaggggcagccccagccctgggaacctctcccactacacccacaagacgccaccatgaagcctcaaaaggttcagtattaagggttttaaccgaaaagagtttaaccagcccaactgtgccatccctgcctccacttcagagggatggagaaagaagtggagaaggtccttaacctgcagtttctgcctttaagccaaagaaacaagctgtgcggacctggcccattaagaggcctca

SEQ ID NO: 1230 - protein, 225 aa, Mus musculus
LWEPYTAELSSWPGSARPRAMEFLWAPLLGLCCSLAAADRHIVFWNSSNPKFREEDYTVHVQLNDYLDIICPHYEDDSVADAAMERYTLYMVEHQEYVACQPQSKDQVRWNCNRPSAKHGPEKLSEKFQRFTPFILGKEFKEGHSYYYISKPIYHQESQCLKLKVTVNGKITHNPQAHVNPQEKRLQADDPEVQVLHSIGYSAAPRLFPLVWAVLLLPLLLLQSQ

SEQ ID NO: 1231 - DNA, 27571 bp, Homo sapiens
  misc_feature (1)...(27571): n = A,T,C or G
cagagcttacagtgagccgagatcacaccactgcactccagcctgggtgacagtcagactctgtctcaaaaaaaaaaaaaaaaaaaaattaatggggcgtggtggcaggcatctgtaatcccagctactccggaggctgaggcaggagaatcacttgaacccgggaggcggaggttgcggtgagctgagatcgcgccattgcactccagcctgggcaataagagtaaaactccatctcaaagtaaataaattaataataataataacaataataattgcatagagaaagtagtcttgaccccattttatgatgaagaaaaggtgaggctcagagaggttaggtaactttcccaagtttccacagctgggcccccgaccccacccctctctgcactgtctccctgttcaccagctgcctttattggatgtggcttgcggcacttaggcagagcacctgttatacaaacaaatgagctgtccattatctggccatctcccacctgcctgcagggacgggccagggtgagcttaagccctgggggactgcatctcagagcctgtcccacaaaccgcctcaggttccctctgagactgtcccacacccagccccctctctagctctttcctttaccttctctactgactccccccatttgctcccagcagatacagatatagcacttggtgccatatctcctttatccccaggagagccaggcaagtggggcgtagaaggaatagcatggtgtagatccaagccccatcaaatgtaccccacctgagttcttttttttttttgagactgagtcttgctctgtcgcccaggttggagtgcagtggtgcaatcttggctcactgcaacctccacctcccgggttcaagccatattctcctgactcagcctcctgagtagtagctgggaccacagacacgcgccaccacgcccaactaatttttgtatttttagtagagctggggtttcactatgttggccaggttggtctgaaactcctgacctcaggtgatctgcccacccggcctcctaaagtgctaggattacaggagtgaaccccctcacctggccttttttttttttttttttttttttttgagttttgagagagggtctcgctctgttgcccaggctggagcacagtgatgccatctcggttcactgtagcctctacttcctgggcttgcccctgttggcctgtgcgggaaccatgcgaggggaaatgcacactgagagtgagagtgagactcagtctccaagaaaaaaaaaaaaaagagagagagagagagagatggggtttcaccacattacccaggctggtctcgaattcctgaactcaagtttgcccacgtcagcctcccaacgtgccgggattgcaggcatgagccactgcgcctggctccccatctgagttctgaataccatcacctttcggagccttagttttttcacctggtcagtggggacataattcctgcctttgcccacctcgcaatgtgtaggagtctataaaaaggaaatagtatgtgataaaatgtacaactgaaaacactggactgtaataaaatgttacacaaatgtaagggattccaagttggttgtaacataggcattaaactataacttctcaaagatattgaccataaaacttacagagccatgggaaaagaataaagaaatgtgcatgttcctgagccttaacttctatgggtgatttttttctctctgcatttgtgtttctctacgttttctgcactaatcatgtattccttctggaattagaaaaaaaaaggcagagcacagtggttcatgcctgtaatcccagcactttaggaggccaaggtgggcagatcacttaagacagcagtttgagaccagcctggccaacatggtaagaccacatctctactaaaaatccaaaaattagcagggtgtggtggtgcacgcctgtaatccctgctattctggaggctgagatgggaggattgcttgagcccaggaggttgaggctgcaatgagccaagatctggctactgcactccagcctgagtgacagagaaagaccttgtctcagaaaaaaaaaaaaaaagaaagaaaaagagaggccgggagtggtggctcacacctgtaatatcagcactttgggtggccgagggggggtggatcacaaggtcaggagatcgagaccatcctggctaacatggtgaaaccccaactctactaaaaatacaaaaaaaaattaactgggcatggtggtgggcacctgtagtcccagctactcaggaggctgaggcaggagaatggtgtgtacatgggaggcagagcttgcagtgagccgagatcacgccactgcactcaagcctgggcgacagagtgagactctgtctcaaaaaaaagaaaaagagaaaaaaattatataaaagtaatgcttctgaaataaaagtatctaactcctggtcttatatactgtgttatagtgaaaaattttagccaggggtggaaaagaggtttatcggctgtaccaagagtgaatgtcctcctgccagtccctcacccagctttcccaccctggatgccaaagttgaggagctggaaaggacagatttctccccagccaaaatcacaaggaagggattcctggccctatgtctctttgctcttctcccctgcctgaagcattgcagtctaggagaaacccttcccatgagcctcagagttcacaagcaacaattgttctgagcttctcaccttcctgagctccagaccctcacctccaaccgcccctgggactcctcattctagaagttccactggtttctcaaatgcaacatgtctgcagcagatactattcactgcttacccaaaagccatgtaatccctgcttctaggctgatagaactccagtgtctttgggaagcagaacagattcaggggtggataggtccctgccccagccccagtcagagcactcccttctcctttgtagatatgggtgtagcaacggacatgtggacacacgaactggttctgttccttgtctgggaagttgctagaaaagattttcttcccagataaaaagagagccttgggctggtcccagataaaaagagagccttgggctggtcagaaggtagtgagttatctcaattgttcacagtcagttacagattgaactccctgctctactcttttctcccttctcacagctgcatttgactaggctttaaaaagggagaggggttccgggcgccgtggctcacgcctgtaatcccagtactttgggaggccaaggtgggcggatcacgagatcaggagttcgagaccagcctgaccaacacagtgaaacccagtctctattaaaaacacaaaaaaattacctgggcttggtagcgtgcgcctgtaatcccagctactcaggaggctgaggcgggagaattgcttgaacccaggagttggaggttgcagtgagccgagatcacgccactgcactccagcctcggcaacagggcaagactccgactcaaaaaaaaaaaagagagagggagagcaccatgggaggataggaccgctttgctcccactccttcttcttggggctcctgtagcttgaatggagctctctggctgaagcagccatcttgtgaccatggtcctgaggacagcagggcgtggggaagcactggaacttcggtgacactgttgagttcctgtctcacttccagactgcttgttatggggggaaagtaagccctttacttaaacttcgagtagctggtattctgttatttgcagccagaaatttatataatgtcccaaactgaactctccattcgtccttcctaggcctgttcctcccgtgcgtttcctatcgataaggagcactcctgcccaccaagccaccccggacttctcccagactcatgctcatggctcagctctcacctatctctgtcctctgctccccacctcctctgccactcctctgctccccccatctcctccagtagcaacagtcaggggagcagaggacagagagctgagccagagtattcactgaacaagctctcacctctctacctgcgttctttgttccctcctccctgaatgggaatgcctacttattctccaaagcccatttcaaatagactctcttctatgaagcactccccaccccagataaacattccttcctctgtgagtctacagcttgttatactacttatacctctattatacttcttatcatgtattctaattatacatttgccagaattataccttcttttttttttgtttttgagatggagtctcgctctgtcacccaggctggagtgcagtggcacgatcttggctcactgcaacctctgcctcccaggttcaagcaattctctgcctcagcctcctgagtagctgggacaacaggtgcgcaccgccatgcccggctaatttttgtatttttagtagagatgggggtttcaccatgttggccaggctggtcttgaactcctgacctcgtgatccacctcggcctcccaaagtgctgggattacaggcatgaggcaccgcgtccagccccagaattatacattctttaggacaaggatgtatttcagagtccctagtgcctcccagtgtagtgtttggcttaaatgattagtaaatttctggtggaaaaggccccaatataaagcatcttctggccgggcacaatggctcatgcctgtaatcccagcactttgggaggccgaggcgggttgatcacctgaggttgggagttcaagaccagctggccaacatggcaaaaccctgtctctactaaaaatacaaaaattagctgggcatggtggcgtgcgcctgtannnnnnnnnnnnnnnnnnnnnnnnnnnnnnnnnnnnnnnnnnnnnaaaatgaataaataaataaaaataaaccaccttctgctgctttctgtgcaggaacctgagtcccatccttctgagcttctgcctctctcatctccctcccactctcccatcctatccaatttcctcttccctgcagtggacttctggggagaattccaccttccctcacagagtctggcccccttctgagtgggatgtggggaggaaattttatagaatatgtccaggggagtggcaggagatgagacagaggtggtgtgggggccatgttgccaaaggccttaaatgccacgctgaaggattttgaaattactctgtagcccatagataattaagtagaaacagatcttttagttatagtcacctcgattctcaagaagataactggactagtatcaaaagatctggctttggtttggcaatatcaaaagctttttcacacatctgtaagcccaaatgtaagccggtccatagtaggtgctccataagtgtttgttgttaagtcaattgcagggttctttttttttttttttttcgtgagacggagatttgctcttgttgcccaggctggagtgcaatggcactatctcggctcaccatatcctctgcttcccaggttcaagcgattctcatgcctcagcctcctgagtagctgagattacaagcatgtgccaccctgcccggctaattttgtattttttgtagagacggggtttcaccttgttgtccaggctgatctcgaactcctgacctcaggtgatccacccgcctcagcctcccaaagttctgggattacaggcgtgagccactgcacctggcaattgcaaggttatttctaagttcttttttagagactgtctagctctgtcacccaggctgcagtgtagaggcatagtcacagctcactgtaacctcaactcccggactcaagtgatcctcctgcctcagcctccagagtagcatgcactatgtaccccagctaacttattattattattattattattttgtgtacagacgggttctcaaaatgtcacccaggctaatttctaactcctggtcttacacgatcctcccaggtcagcctcccaatagtcctaagttctttttctttttctttttttttttttttttttttgagagtcttgttctgtcgcccaggctggagtgcagtgcagtggcacgatctcgggtcactgcaacctctgcctcccgggttcaagtgattctcctgcctcagcctcctgggtagctgggattacaggtgtgtgccaccatgcctggataatttttgtatttttagtagagacggagtttcaccatgttggtcaagctggtctcaaactcctgacctcgtgatctgtccgcctcagcctcccaaagggctgggattagaggtgtgagccaccatgcccggccaatagtcctaaattctaagagccaatccacccaactgctcagcaactgagggatgtctgaatgtgcatggatatgtttatttctgtcctgctttcattgcaatggcaaactctgaaatactcacgtaatgaagcattacactccctttaaaacattgtttacaaagggtttataacatggaaaatgtcttctgttgtaaagggaaaaaaagaagcacacaattgaaatgagtcatgtttatcacattgtctaaaagcaagcaaaatctcttccccagcaaaaagctggcagggcagggaggccaatgttaacagcagccggtggtcctcccctccccttatcctcctgttctctattttccaactttttttttttttgagatggagtgtcactctgttacccacgctagagtacagtggtgcgatctcagctcactgcaacttccacctcccagattcaagtgattctcctgcctcagcctcccaagtagctgggattacaggcacccacgactacacccagctaatttttgtatttttaggagagatggggtttcaccatgttggccaggctggtctcaaactcctgacctcaagtgattcacccgcctcagcctcccaaagtgctggaattacaggcgtgagccaccgtgcccggcctattttccaacttctgaaaaatgtgtgcacattactaataaagtggggaagggtatactttatgtttcaaaatgaccttgagggagtacgacagagattgctctcagcccaggttctgctcctccccctgctgcctcaccccattgcccagagatgacccctggggctgagccaggtttcacttgccccagggccctgcagctctggccttcccctccccaaactgcagggcacccagcaaaggagtcgcaatccagtacctgcacctgttcccaactggaaatgctgcctccaggcagccagggcctaccccaagacctcagaggaatttcctctgaggaaattcctgccctcccaggaatttccagaaaggactcatggaggaatttcctagacatgcagacaggcagacagacagacacctcaggcagctctcgtcactaagcgcagatgtttgcctgcgggtgacgtgctgggagccaacacaagcacacaattttgcggcgagaggcagcacgaagcaagaatggagagcagacccacccgggcaggctgggggctggcatgaggaagggactgggagggggccccagagttggtcagcagatcgagtctccaggaacagaagtccctactattatctctgtctgaatggcacagtgccctgcaactctcctctcagcacagcaggcattgcaggggctccaggaagggtcagggtagtgtgactgtgagtggtagggccgcagtctgggcttgagcacttagcaagtttgctgtcctggtggcttgtcaatatcccctaccggcctgggggctccccaaggtagtgattttatcttaaacccatccttacactctcggtgcccatcgcaacacccagctcatcacaacactcagtgtctagggctgctccagtagggtggatgatcgacccccatatggataggggagtggatagagagtgatgggatcaatgccctaagtgagatgagaatactggggacagcaccaaagcagggaaagagggctccgggtcctgtcggtgcgcagaatttccatgcacgcttctgcacccagcttgctccagacctagacgcaggcaagagctgacgtggccccgccagactgggcccagcgagcccgaacctgcctggcccaagcagctgcagcgtgggacttcacacgtccccgcccagtcccagtggtcagagaaaccagggaatccggcccaaagctgtctcctccaggaggcaacccgggccacctgctctaaagagctaccagcatccctcccctcttcaacccccctgctggctccttttcagaacagttatgtccagcagaagttaagttccttcactgaacagtgagtgatttcactcactccacagatatttactgaccatctactgtatgtgctagatgctgtgccaggtgctggcagtaagataatgaacaaaacaaaaacccatgtcctcctggagctttgactctatggaatgcccgaactgggaggcagtactctcgccggggccacgtgggaggtcgacacccaggtgtcctcctaggtgagcaaaaggcgcgtgaggtgccgccctgggagcagtcggcgggtggacttcgtcctgggcgagaggagcgggccgcacctcggacaaacgcttggctgggcacgtcgcctggggcaggtgcccgagggagaggggggtggcgctggccgtgcgcaaaacccggccctgacccggccacggggttagaggccgttggtactctatgtttattgtaaacgcagcgaatacggcctccagcggcctcagcgcacgtggtggtgcagtggggagccggctgggccctccccagctccaggctcctccccggcggggtcagcgccagacttgctgcggcgtccgggccccgcgtaattacaggggctgtagccaggcctggccgtaaaataggaggatgaaacggcctgggaactggagaagctgggccggagctggccaggggccccgggtccgtggcttcccgcgatgcgcagccgcagggaagggccggctgaggatgcgcacacacactcacaacaccaacctggcgcgcacacagccacacaaccacacacgtaaaccaccaaacgcacgcagacacacagcattcggctctcccactccaggctcactcgtgagcctaatcaaacacctgcccgccctctccaccccaggagctgacacccgcccgccaagccctctccagacggcagcagatccaggcggggagaagagccccgagaggcaaattccagtgggtttgtttacacagcgcgggggagggggcctgagccgggtactggggcccgactgactgggagccccagctcagactgggccagctccagctgtgcagcctgaggactgcgcacaaacgcccctccgttccaccccacccccgctgcacgccggtacgcgtctcccctcctcttcacacgctgttcacaaacattagcatacgtctgtcaaagagtttcacacgcttccacacacgcggctgtgatactactcacaaatgctttcatgctagcgcgccatcacacgtatttcatgtgtggttacagtttgtcacccttcatgcccagattctcacagtccatattcaagagcctgttcgcacggtgtacgcgtgtgttgttacatatactcaggttattagcgctctttgacttatctaaaataagaacggccccctctcgagcccagggtcccgcgtgtcgctcctgcgggcaggcactgatgtgatggacagaggcgtccttagccccggccgcacacgttacacactcgatcacacaaagcgttgcactttattcccggcatctaggcgatgacacaatctccagaacaaagacaacattgacaaacccaacaaaaacaaacagccgcgtgtgtgtggggaggggcagtcaagcgcagagtccgggaaggggatgggggaggaggagagtgtgggaacgcgggcgcccgagcctgggcatgcgaggctcagaaaggtgcggggcatgtcaacaacctcgcaccctgcaaggtccgcgcgcggagcagcaaagccgtgtcccgcacccccgcgttcgcagactcgcacttgcgagttcttcccttctcccgcacgcgactgcgcccagggacgcaagcccaccaccgggacaggctcacaaagctccacgcagacccacaagtgagcgaacacacatctctgagcagatctgcgggggcagaggagcgcgcttcgctctttcctgcacccccagcctcctcgcctccccaccccgcccctcctccacctccccagcccccaagcccccgggcagccgcgcgccgggcggggcgagggcggggcggggtgtcgggcggcgccggcccaaaaggcggagtcgctaggcgaaggggccagatctgtgagcccagcgctgactgcgccgcggagaaagccagtgggaacccagacccataggagacccgcgtccccgctcggcctggccaggccccgcgctatggagttcctctgggcccctctcttgggtctgtgctgcagtctggccgctgctgatcgccacaccgtcttctggaacagttcaaatcccaagtaagcctcgagactcccgctggcagcctgggctcccggctggcactaccccaccgggataactgtcccggccaaaccctgagctgagcctagagtagatgaccgaggtaggagggcggctgtagattttcctcccctcacttctccgtcatatctgggagcaccccaccccggggcatgcttgtgtctacttgcatgggcttatatctgcccttcccttccttctctctggcacccctattactctaaagtgagggactcatgctgggcagttcctgccttcagcatagacttcgcccctggcagccagggcccttgttccaggccccccacccccccactgtgaaagcctccacgcctctccttgtgtgtcctttgggtatctgaccacactgacagatacctggtgtgacatcaagagtgcacagaatgctcaaggtaaccctggaaggacctctcaggagagagctgggctgtaggcattcattatgcattcaccctgtatttaaagcaaacctggaaagtccctcactaggggtcttttggggtggcatgagtgaggcacatgctgtgcatgggtaggctgagggaatcacctgtttatggggctctcaagtagtaaaagcgaagagctgggagagggagatcatgggaaagcttcagaatgaacagaagaggttaaaggggttacagaaggttctgggcaggaaggagttaatttctcctgggcaggtttagggctgtgaggcaaatggtactgggaggaagactctgtcggcccctttgttcttgcccttgagttttctgaagttatgggaacaatatttgagggaatacaggagagggtggtagggaggagcagggagagaagtgggcagcttggtatcacgaaagccatctcaccggcttagccactctcggccctagcaagcttgccccccactccccttgagaaatatgttgtgccagcttcctctgaccccgtgtcatcgtctggtgaggcagtctgttgtctgtggcttgttagggtgggggagagaacagccagctgccaaccccagagggcaatgccctcctgcccatggacgctggggaggctcagccagccctccgccacccgctccctgtgctttgcctccttgacctgatgcatctcgccctagtatgggagagagcaaagtccctgtttatgcccatgccaggtgttgactggaggaggaggaggggacaggaagccatgagtagggagggggggaccctggccttttccgttcccaagctcccaggtttcctctctttcaggaaggagcctcttccttacccacctccccgccttccctgacgccgctgcccccctttcccagatggggagcaagagtcaaatgaaggctaagtacagcagactgtacccccaggagagggggctgatgggtgaccctctggccacacacacacacacacacacacacacacacacgcacaccctatcatacccaggactaaagagacgccagtccagagtagagtccgtaggcagccaagctgggcccaagcgtgggggcaaatatgaggctacaatgaacggggtaggtgaggctggcatgggtgactcaggccagtgggcagcagccctgggatctccaggcctcaggcgggggcagcatgctgagaagggcgccagcctccctcatgctggagggcaggcccctcattctgacctgccagctccctttgtttggaggacactgttgggggtgagtgggcgctgtgccctcctggggtcctgggggctgtgcacatttgacaaggtaagttttcacaagttctcatgagtgctggggcgggtagcagaggtggatgaggaatgagtcagtgcccgtcacgggaatgagggaaagacgccaggcccagagctgaaatacctgttctgaaatggcttctatgtttatctctccagagaggaattttaaaagcctctctctgctcctctcttttccccagggtgggggaggggcctggtaagcccagtttgggcgctggcacgctgctgcaaagcctggcctctcaggggtcatgctgattgggcagtgggtgcccacctccgagtcctctctgcctgactccttcctcgccctcccagccgtggccagggctttcagttcgaagcaacttagcgctaattctgctgggtctctagctggcagtgcctgggggaattagagaaactgaccagcttgcggggtcgggggaagcacttttccccctactgggaccccacccaggctggagccaggtgtctggagctggtggggaggggctggtgggcagtcaggctggagccggtggggccagggggaatgaactaggggaggggtgctggctccaccttgggaggaggggagaggaggggagagnnnnnnnnnnnnnnnnnnnnnnnnnnnnnnnnnnnnnnnnnnnnnnnnnnnnnnnnnnnnnnnnnnnnnnnnnnnnnnnnnnnnnnnnnnnnnnnnnnnnnnnnnnnnnnnnnnnnnnnnnnnnnnnnnnnnnnnnnnnnnnnnnnnnnnnnnnnnnnnnnnnnnnnnnnnnnnnnnnnnnnnnnnnnnnnnnnnnnnnnnnnnnnnnnnnnnnnnnnnnnnnnnnnnnnnnnnnnnnnnnnnnnnnnnnnnnnnnnnnnnnnnnnnnnnnnnnnnnnnnnnnnnnnnnnnnnnnnnnnnnnnnnnnnnnnnnnnnnnnnnnnnnnnnnnnnnnnnnnnnnnnnnnnnnnnnnnnnnnnnnnnnnnnnnnnnnnnnnnnnnnnnnnnnnnnnnnnnnnnnnnnnnnnnnnnnnnnnnnnnnnnnnnnnnnnnnnnnnnnnnnnnnnnnnnnnnnnnnnnnnnnnnnnnnnnnnnnnnnnnnnnnnnnnnnnnnnnnnnnnnnnnnnnnnnnnnnnnnnnnnnnnnnnnnnnnnnnnnnnnnnnnnnnnnnnnnnnnnnnnnnnnnnnnnnnnnnnnnnnnnnnnnnnnnnnnnnnnnnnnnnnnnnnnnnnnnnnnnnnnnnnnnnnnnnnnnnnnnnnnnnnnnnnnnnnnnnnnnnnnnnnnnnnnnnnnnnnnnnnnnnnnnnnnnnnnnnnnnnnnnnnnnnnnnnnnnnnnnnnnnnnnnnnnnnnnnnnnnnnnnnnnnnnnnnnnnnnnnnnnnnnnnnnnnnnnnnnnnnnnnnnnnnnnnnnnnnnnnnnnnnnnnnnnnnnnnnnnnnnnnnnnnnnnnnnnnnnnnnnnnnnnnnnnnnnnnnnnnnnnnnnnnnnnnnnnnnnnnnnnnnnnnnnnnnnnnnnnnnnnnnnnnnnnnnnnnnnnnnnnnnnnnnnnnnnnnnnnnnnnnnnnnnnnnnnnnnnnnnnnnnnnnnnnnnnnnnnnnnnnnnnnnnnnnnnnnnnnnnnnnnnnnnnnnnnnnnnnnnnnnnnnnnnnnnnnnnnnnnnnnnnnnnnnnnnnnnnnnnnnnnnnnnnnnnnnnnnnnnnnnnnnnnnnnnnnnnnnnnnnnnnnnnnnnnnnnnnnnnnnnnnnnnnnnnnnnnnnnnnnnnnnnnnnnnnnnnnnnnnnnnnnnnnnnnnnnnnnnnnnnnnnnnnnnnnnnnnnnnnnnnnnnnnnnnnnnnnnnnnnnnnnnnnnnnnnnnnnnnnnnnnnnnnnnnnnnnnnnnnnnnnnnnnnnnnnnnnnnnnnnnnnnnnnnnnnnnnnnnnnnnnnnnnnnnnnnnnnnnnnnnnnnnnnnnnnnnnnnnnnnnnnnnnnnnnnnnnnnnnnnnnnnnnnnnnnnnnnnnnnnnnnnnnnnnnnnnnnnnnnnnnnnnnnnnnnnnnnnnnnnnnnnnnnnnnnnnnnnnnnnnnnnnnnnnnnnnnnnnnnnnnnnnnnnnnnnnnnnnnnnnnnnnnnnnnnnnnnnnnnnnnnnnnnnnnnnnnnnnnnnnnnnnnnnnnnnnnnnnnnnnnnnnnnnnnnnnnnnnnnnnnnnnnnnnnnnnnnnnnnnnnnnnnnnnnnnnnnnnnnnnnnnnnnnnnnnnnnnnnnnnnnnnnnnnnnnnnnnnnnnnnnnnnnnnnnnnnnnnnnnnnnnnnnnnnnnnnnnnnnnnnnnnnnnnnnnnnnnnnnnnnnnnnnnnnnnnnnnnnnnnnnnnnnnnnnnnnnnnnnnnnnnnnnnnnnnnnnnnnnnnnnnnnnnnnnnnnnnnnnnnnnnnnnnnnnnnnnnnnnnnnnnnnnnnnnnnnnnnnnnnnnnnnnnnnnnnnnnnnnnnnnnnnnnnnnnnnnnnnnnnnnnnnnnnnnnnnnnnnnnnnnnnnnnnnnnnnnnnnnnnnnnnnnnnnnnnnnnnnnnnnnnnnnnnnnnnnnnnnnnnnnnnnnnnnnnnnnnnnnnnnnnnnnnnnnnnnnnnnnnnnnnnnnnnnnnnnnnnnnnnnnnnnnnnnnnnnnnnnnnnnnnnnnnnnnnnnnnnnnnnnnnnnnnnnnnnnnnnnnnnnnnnnnnnnnnnnnnnnnnnnnnnnnnnnnnnnnnnnnnnnnnnnnnnnnnnnnnnnnnnnnnnnnnnnnnnnnnnnnnnnnnnnnnnnnnnnnnnnnnnnnnnnnnnnnnnnnnnnnnnnnnnnnnnnnnnnnnnnnnnnnnnnnnnnnnnnnnnnnnnnnnnnnnnnnnnnnnnnnnnnnnnnnnnnnnnnnnnnnnnnnnnnnnnnnnnnnnnnnnnnnnnnnnnnnnnnnnnnnnnnnnnnnnnnnnnnnnnnnnnnnnnnnnnnnnnnnnnnnnnnnnnnnnnnnnnnnnnnnnnnnnnnnnnnnnnnnnnnnnnnnnnnnnnnnnnnnnnnnnnnnnnnnnnnnnnnnnnnnnnnnnnnnnnnnnnnnnnnnnnnnnnnnnnnnnnnnnnnnnnnnnnnnnnnnnnnnnnnnnnnnnnnnnnnnnnnnnnnnnnnnnnnnnnnnnnnnnnnnnnnnnnnnnnnnnnnnnnnnnnnnnnnnnnnnnnnnnnnnnnnnnnnnnnnnnnnnnnnnnnnnnnnnnnnnnnnnnnnnnnnnnnnnnnnnnnnnnnnnnnnnnnnnnnnnnnnnnnnnnnnnnnnnnnnnnnnnnnnnnnnnnnnnnnnnnnnnnnnnnnnnnnnnnnnnnnnnnnnnnnnnnnnnnnnnnnnnnnnnnnnnnnnnnnnnnnnnnnnnnnnnnnnnnnnnnnnnnnnnnnnnnnnnnggtttcaccatattggccaggctggtctcgaactcctgacctcgtgatccgcccacctcggcctctcaaagtgctgggattacatgtgtgagccaccgcgcctggcctaggagtagtattaagtggcccaggcaagaggaacatattcagactcggaggaatgaaggatgaaatgtggggaggggcagtgtctatgctgagggttatttccaaagaatgagaggctgggctgaacattgggcaggaagttagcaaaaactaaggagggtaggaatcaaggttagagggaagagaagaatgaaattgagtagggagctgagaaagcagggcgaggggcatttggacttacattttcttccagcaaaggtttcttatttaacccctgtgggcttatcttgcagccaaacccatccaccagcatgaagaccgctgcttgaggttgaaggtgactgtcagtggcaaaatcagtgagtgtcggagccctgtgggcctccttcctccatctctatgctgggtgcggtctagtgatctaggatggtatagaagtcttgcagcccagcccactcatacttacagccctctgcctctttgatacagtacctgatctactaccactcttgtctttcagctcacagtcctcaggcccatgtcaatccacaggagaagagacttgcagcaggtgggtagctggagcaaactgggcctggggcacaggaaggggtctgcttgaagaggttgggtacaggaggtggctcctttaccaggctgaggctgagggaatcctgttgggctgagagccagtacaaatagtggagccactcacactggtggcctttgccctctcaccttgcagatgacccagaggtgcgggttctacatagcatcggtcacagtgctgccccacgcctcttcccacttgcctggactgtgctgctccttccacttctgctgctgcaaaccccgtgaaggtgtatgccacacctggccttaaagagggacaggctgaagagagggacaggcactccaaacctgtcttggggccactttcagagcccccagccctgggaaccactcccaccacaggcataagctatcacctagcagcctcaaaacgggtcagtattaaggttttcaaccggaaggaggccaaccagcccgacagtgccatccccaccttcacctcggagggatggagaaagaagtggagacagtcctttcccaccattcctgcctttaagccaaagaaacaagctgtgcaggcatggtcccttaaggcacagtgggagctgagctggaaggggccacgtggatgggcaaagcttgtcaaagatgccccctccaggagagagccaggatgcccagatgaactgactgaaggaaaagcaagaaacagtttcttgcttggaagccaggtacaggagaggcagcatgcttgggctgacccagcatctcccagcaagacctcatctgtggagctgccacagagaagtttgtagccaggtactgcattctctcccatcctggggcagcactccccagagctgtgccagcaggggggctgtgccaacctgttcttagagtgtagctgtaagggcagtgcccatgtgtacattctgcctagagtgtagcctaaagggcagggcccacgtgtatagtatctgtatataagttgctgtgtgtctgtcctgatttctacaactggagtttttttatacaatgttctttgtctcaaaataaagcaatgtgttttttcggacatgcttttctgccactccatattaaaacatatgaccattgagtccctgctaagtgcgaggctctctgtgctacaacagtagcaactgggtttgaatttctttctctccaaagaatgtgtgcccctcacgaggccaaaagggtgggatgtttcctcctctgagggctgtccaggaccggagtgctcctgacagctgtctctcgggttctgagctgcactccactctggaagttcttcctatccgacctctaccccactcccactccgtcaccgcagggctttggcatactaccattcaggtactcacgctgtttcggtgagtcagggaagctgggaacgccagctgaggcatgcggccccgccccacagccacactagcagagacgtgtgggaggctgggagggaaagttcccagtaacaagtgggttggaccgggggtcagtgatagaggcgtcagtggattggccacgtcatgtaaagttgacccgagagggagggcaaaagaggaaggcttggtgattcctggtaatgtgttattttgagaaaaagcttcggcagcacactccagaaaaaaacttcccaaaccctgggcaactgaggttctgatgtggagctctggatggaaagcgtgctgaagtcttgttaaactagcaagcttttgtttggaggtccaccgccgaaggcgcacaggcctgtgggaacacgagcgttgagactgggggcgtctagatgatccaaggggtaggcagagtgtgagcagcggcaggtatcggggacacacccgcggagccctaggaaggggactgaccgggacatggaagaggtctggaccaaggtactgggaaggcgctcggaggagaggggcgcgagttccggttcggcgtcggagggagggtggggcttcggcgcagtttccggagggacggcccgagcgtgcgggggcggagccgagtgcgcggggcggggctccagagccgcaggtctgggctgcagtaggtcccggcaaccgcaggctcgcggcgggcgctgggcgcgggatccgactctagtcgtaatggaggcgggcggctttctggactcgctcatttacggagcatgcgtggtcttcacccttggcatgttctccgccggcctgtgagagtgcggccgggctgggttggggaggactaggcagtcaggaaaggagagagaggggacagagacgtggccacagcacctggctcgtccggaaccgggatcaaagtgggatcgggtcgaggggaccggggtacaagggcgaggctggtcactaggcctgaaggagaaggcaggatagctggcgggggggagaggggggcggggtctgcggtggtccggaaaggatgacaggcattgggcatccccctctagcactctgcttctcccttcccacccccacccctcccttcggggccccattacagctcggacctcaggcacatgcgaatgacccggagtgtggacaacgtccagttcnnnnnnnnnnnnnnnnnnnnnnnnnnnnnnnnnnnnnnnnnnnnnnnnnnnnnnnnnnnnnnnnnnnnnnnnnnnnnnnnnnnnnnnnnnnnnnnnnnnnnnnnnnnnnnnnnnnnnnnnnnnnnnnnnnnnnnnnnnnnnnnnnnnnnnnnnnnnnnnnnnnnnnnnnnnnnnnnnnnnnnnnnnnnnnnnnnnnnnnnnnnnnnnnnnnnnnnnnnnnnnnnnnnnnnnnnnnnnnnnnnnnnnnnnnnnnnnnnnnnnnnnnnnnnnnnnnnnnnnnnnnnnnnnnnnnnnnnnnnnnnnnnnnnnnnnnnnnnnnnnnnnnnnnnnnnnnnnnnnnnnnnnnnnnnnnnnnnnnnnnnnnnnnnnnnnnnnnnnnnnnnnnnnnnnnnnnnnnnnnnnnnnnnnnnnnnnnnnnnnnnnnnnnnnnnnnnnnncaggagaatggcgtgaacccaggaggcggagcttgcagtgagccgagatcgtgccaccgcactccagcctgggcgacagagcgagactacgtctcaaaaaaaaaaaaagagtgaaagaccctttgggtcctcctctcacactgaaccctttgagccatgtccatcccctccaccctgcagcaacctgggctggctgagttatggggctttgaagggagacgggatcctcatcgtcgtcaacacagtgggtgctgcgcttcagaccctgtatatcttggcatatctgcattactgccctcggaaggtagaggccctcccttggacccacctatctgctgcacgccctgccttgctggcagggcaaacactatttcctagaagactgtaacagctggcactgccaccttttccaggaaggcctctccagccttgcaggtccccttcctctatgaagccagccttctgagatgaacacattgcccccatttaggcaaggctggtagctctgcctagcctgagatgcctatgctgcctgccctgggcttcagccaacaagctaaggggaaagggcttttgtctctgatatttctttcagagccagggcctgtgggtgagaatgagatgattagctctgcgtccctgctaaatcacacaagcatttatgaagctcctactgtgtgtgccaagcacacagaaaaaaacacatatttatctcccccagaagtctccagtgttgtgggtggataagactttcctatcaagttggtggtgggaaagaagctgtgacagtgcagtgctggaggcctagacagcttggcttccccattggagcactggagaaggcaggatgaattaactctagcagggaagtcagagtgcacatctggaagtaagggtactctctcccctgcagcgtgttgtgctcctacagactgcaaccctgctaggggtccttctcctgggttatggctacttttggctcctggtacccaaccctgaggcccggcttcagcagttgggcctcttctgcagtgtcttcaccatcagcatgtacctctcaccactggctgacttggtgagtgggggtgtccaaggaggtaggagagataagagtcaggctctcatagccaaatactatggcttacagtcccgaggaaggggagatccaaaccctggaagaagacaaggcagtagaagtgggcgagtgggaggcaggaaaggttgggtgacagatcagggagggtgtctgacctttttcttgaggaaattcttaggcaagtgaagctttacgatgtgcttgggccaagagagtcttccattctttcccacaggctaaggtgattcaaactaaatcaacccaatgtctctcctacccactcaccattgctacccttctcacctctgcctcctggtgcctctatgggtttcgactcagagatccctatatcatggtaagcacaactgggatggggtgacaggggtgcaagatggaaaactggctcctctcctcatagcagttcttgtgatttcaggtgtccaactttccaggaatcgtcaccagctttatccgcttctggcttttctggaagtacccccaggagcaagacaggaactactggctcctgcaaacctgaggctgctcatctgaccactgggcaccttagtgccaacctgaaccaaagagacctccttgtttcagctgggcctgctgtccagcttcccaggtgcagtgggttgtgggaacaagagatgactttgaggataaaaggaccaaagaaaaagctttacttagatgattgattggggcctaggagatgaaatcactttttattttttagagatttttttttttaattttggaggttggggtgcaatctttagaatatgccttaaaaggccgggcgcggtggctcacgcctgtaatcccagcactttgggaggccaaggtgggcggatcgcctgaggtcaggagttcaagaccaacctgactaacatggtgaaaccccatctctactaaaaatacaaaattagccaggcatgatggcacatgcctgtaatcccagatacttgggaggctgaggcaggagaattgcttgaacccaggaggtggaggttgcagtgagctgagatcgtgccattgtgatatgaatatgccttatatgctgatatgaatatgccttaaaataaagtgttccccacccctgcccacgatggttcattctctactcataattctaaacctgcctggtttggtgaaggatagatccacagttattctcaggttggtagggtaggctcagaaaaggtatctcaaagaaccaaaaggttggaaagacccaggaaggccttaaaaataacaaaacttggatgttatgaagaatggaacttaggcttcaagaaagtacttctggccgggtaaggtggcttatgtctgtaatcacagcactttgggaggcccaggcaggaggatcacttgagcccaggagtttgagaacagcctgagcaacacagcgagaccctgtcactacaaaaaattaaacattagcctggtggcgtggtggcatatgcctgtagtcccagctactctggaggctgaggtgggagaactgtttgagcctgggagggtgaggctgcagtgagccatgattgcaccactgcactccagcctgggcaacagagtgagaccctgtctcaaaaaaaaaaaaaaaaagaagtagtacgccgggcgcggtgactcacacctgtaatcccagcactttgggaggccgaggcgggcggattacgaggtcaggagatcagaccatcctggccaacacggtgaaaccccgactctactaaaaatacaaaaaattagccaggcgtggtggcaggcgcctgtagtcccagctactcaggaggctgaggcaggagaatggcgtgaacccgggaggcggagcttgcagtgagccgagatcacgccactgcactccagcctggacgacagagcaaggctccgtctcaaaaaaaaaaaaaaagaagtacttcctacagggttgaaaggaccaggaaagtgaaatgtcatttccatcctgagaaatattgagaaggggtctttgcctccttgggagcaaaaatgggaacaccagcaagatgcaaagataaaggctgagatggcctcaagaaggtggttctttcacattcacttctcgaccgttagtacatagaatccccaatacccgttttccatactcaaactaaacgaagttagaaaataaactggctctttaatgggaaatgggaggaagggctgtccgcacaggaatggggttaggctgtcagaagcgcagccccctgcgggctaagtcggctcgggcctcctgtatctggctctgcagctcgcgtgcggcgtcctcgcagtcatgaaaagtggccacacgatagcccacagtgcccagggcatagcagccggcggacaccagcaagtaggcgggcagtggccacaggacttcctggcaggacaagggcagctccaggcccaaggctcccgtggtcagggccacccaggtggagcccaggatcgctagtccccaaagccactgcgctaatttcgtcatggtcactgcgagagaaggaagcaatgctcccctgaggagcagaaaggaaaagcggaccaaactcaaccgaagcccgcccacggagagcattaaaaccagccctggccagaggggaatcgccgatcccagaggtccgaacttgagtgcccacaaaaggtggaagggccccttccaccttgctaccccctctatatttgagacccactccccatctctcgccctccccattcagccttcaacctacacttacctctaccccacgtctccccttccccgcgcggcccggatgttggcgtccggaagtcctccctggttcacgttccgcttccgcgcggccttctgggagttgtagttcacctggcggcgcctggtgtactcctggccagcgcctcaatctaggcgggggtacagtgggctgtgctccgcaaacggggagcaggccgggtctggagaggcctcggcgctgctttcccaccttgggctacgctccaggctggcgtggggcttgaggacatccttaaatgttgcaacaagatgggaatataataccattccccttaaactcaattctccagcgctgaaatccattccttcattcactagttcattcattcgaagatttctttctttccattcttgacagggtctctctatagtgcctaggcgggacagaactccttttttttttttttttttttttttttttgagacaaagtctcgctctgttgcccatgctggagtacagtggctcgatctcagctcactgcaacctctgtctcccgagcagctgggattacaggcgcgcgccaccacgccgggctaatttttttatttttagcagagaacggggatttcactatgttggccaggctggtctcaaactcctgacctcaagtgactggcccacctcagccttccaaagtgctaggattacaggcatgagccacagcgcccggccagaacatttcttgattaccatgatagactttggagatacagagatgtcaagagactcgacccctttcaggtggagggggaaagcaggagtcagtgaagcagttgcattgacaactaaccatgaaggcttgagattattgttagaacagaggtagtcatatttttacaaggacaacaaccaatataacttggagccagaggaagaagggctccaggagtctgggtttcaaaaaaaaagaaaagaaaagaaagaccagaagaattacctgaagtggtgaaggcattgaaagaaagagtataattctttagaacagttttggggatgaatttattatgtatagagagaaagagagagagagaacaaagtaagagaaaaggttaggcaattatcaacttcagaggaaacaaagagttatataagaaaggaaagacaattgataagcctgtcttataaagaccacatctgtagtttgacagttaggtttattaacttgccacaacagagagatcacacactagaagaactgtggggcaactcattaaaaaggaagaaatatggtcattcagatgatatggtttggctgtgtccccacccaaatttcaagttgatgtgtatctcccagaattcccacgtgcgagggacctaaggggaggtaattgaatcacgggggccagactttcccgtgctattttcatgatagtgaataagtctcacaagatctgatgagttcatcaggggtttctgcttttgcttcttcctcatttttctcttgccaccgccatgtaagaagtgcctttgtctcccgccatgattctgaggcctccccagcaatgtggaactgtaagtccaattaaacctctttttgtttgcagtttcgggtatgtctttatcagtaatgtgaaaatgaactaatacaacaggatatgggaaaggcttgactttaaaatttatattttaaaatttatttacttatttatttagagttgaagtctcggtatgttgcccaggcgaagctcaaacttctgggctcaagtgatcctcctgcctcagcctcccaagtggctgatactataggctagctaaaatttaaatgaagcagtgttttgatcggttcgaggtaagcataactttaagtgaagggatcaagaagtccaagctgagggaccacttggaaattacaaagtcaagataaatatagaatatagtgtccaaaaacccactatctaggctgggcacagtggctcgtgcctgtaatcccaacactttgggaggccaaagtaatccacgtggctcagaacttctggcaagagtaggatgttccattcgcactgactgatttcaaatagcaaagtttgtgactatgattttagaaaatgaagtttctcagccgtatgtcctggatgttaattaacaaaagcagtttttacagattcacagtcttagcacaaacacaaatggctcagctgtgaagaaaattttcacagccgtaacgatgtaaacactaagtattgatttaactaaaaattggagctggggacagtggagctgtgatcccagaactttgggaggcctaggtgggagtgttgcttgaagaaatgtacagataagtaccagaagaagcagcctagaaactggagcgtagttgtatatgtaggttgtatatgtaagggttaaagaagaggagcaggggatggttatttttcattaaaagccttgtagagttacagctctttttttttctattctttttctttttttcagacaaggtcttgctctgttgcccagggtggagagcagcggtgcaaacatggcttactgcagcctcgacctcctggactcaagctatcctcccacctcagactctggagtagcagggactacagaagtgggccaccaccaccacgcccatctagtgtgtgtgtgtgtgtgtgtgtgtgtgtgtgtgtgtgtgtgtgtgtagacggggtctccctatgttgcccaggctggtctcaaaatcctgggctcaagcaattcatctcagcccccacaaagtgctgctattgcagtcgtaagccacggcgcccaccgaagttacagctttcagaatttgttgagcaggtttcccggttttcacttgaaaatgccccgccaccccgaaaaatatttgttgaactagttggcttttaaaactatacaaattcctttgttaaagtaaaaattaaaacaaataaaaacttttctttttttttttgagacagagtctcgttctgtggcccaggctagagtacagtggcatgatctcagctcactgcaacctctgcctcccatgttcaagcgattagcctgcctcaacatcccaagtagctgggactacaggcacgcaccaccacacccagcaaatctttgtatttttattaaagacagggtttcaccatgttggtcaggctggtctcgaactcctgagcttgtgatcctcccacctcggactcctaaagtgctgggattacaggcgtgagccaccgcgctcagcccaaactttttttttttttttttttgagccggagttttgctcttgtcgccgagnnnnnnnnnnnnnnnnnnnnnnnnnnnnnnnnnnnnnnnnnnnnnnnnnnnnnnnnnnnnnnnnnnnnnnnnnnnnnnnnnnnnnnnnnnnnnnnnnnnnnnnnnnnnnnnnnnnnnnnnnnnnnnnnnnnnnnnnnnnnnnnnnnnnnnnnnnnnnnnnnnnnnnnnnnnnnnnnnnnnnnnnnnnnnnnnnnnnnnnnnnnnnnnnnnnnnnnnnnnnnnnnnnnnnnnnnnnnnnnnnnnnnnnnnnnnnnnnnnnnnnnnnnnnnnnnnnnnnnnnnnnnnnnnnnnnnnnnnnnnnnnnnnnnnnnnnnnnnnnnnnnnnnnnnnnnnnnnnnnnnnnnnnnnnnnnnnnnnnnnnnnnnnnnnnnnnnnnnnnnnnnnnnnnnnnnnnnnnnnnnnnnnnnnnnnnnnnnnnnnnnnnnnnnnnnnnnnnnnnnnnnnnnnnnnnnnnnnnnnnnnnnnnnnnnnnnnnnnnnnnnnnnnnnnnnnnnnnnnnnnnnnnnnnnnnnnnnnnnnnnnnnnnnnnnnnnnnnnnnnnnnnnnnnnnnnnnnnnnnnnnnnnnnnnnnnnnnnnnnnnnnnnnnnnnnnnnnnnnnnnnnnnnnnnnnnnnnnnnnnnnnnnnnnnnnnnnnnnnnnnnnnnnnnnnnnnnnnnnnnnnnnnnnnnnnnnnnnnnnnnnnnnnnnnnnnnnnnnnnnnnnnnnnnnnnnnnnnnnnnnnnnnnnnnnnnnnnnnnnnnnnnnnnnnnnnnnnnnnnnnnnnnnnnnnnnnnnnnnnnnnnnnnnnnnnnnnnnnnnnnnnnnnnnnnnnnnnnnnnnnnnnnnnnnnnnnnnnnnnnnnnnnnnnnnnnnnnnnnnnnnnnnnnnnnnnnnnnnnnnnnnnnnnnnnnnnnnnnnnnnnnnnnnnnnnnnnnnnnnnnnnnnnnnnnnnnnnnnnnnnnnnnnnnnnnn

SEQ ID NO: 1232 - DNA, 1654 bp, Homo sapiens
aacgcgggcgcccgagcctgggcatgcgaggctcagaaaggtgcggggcatgtcaacaacctcgcaccctgcaaggtccgcgcgcggagcagcaaagccgtgtcccgcacccccgcgttcgcagactcgcacttgcgagttcttcccttctcccgcacgcgactgcgcccagggacgcaagcccaccaccgggacaggctcacaaagctccacgcagacccacaagtgagcgaacacacatctctgagcagatctgcgggggcagaggagcgcgcttcgctctttcctgcacccccagcctcctcgcctccccaccccgcccctcctccacctccccagcccccaagcccccgggcagccgcgcgccgggcggggcgagggcggggcggggtgtcgggcggcgccggcccaaaaggcggagtcgctaggcgaaggggccagatctgtgagcccagcgctgactgcgccgcggagaaagccagtgggaacccagacccataggagacccgcgtccccgctcggcctggccaggccccgcgctatggagttcctctgggcccctctcttgggtctgtgctgcagtctggccgctgctgatcgccacaccgtcttctggaacagttcaaatcccaagtccaaacccatccaccagcatgaagaccgctgcttgaggttgaaggtgactgtcagtggcaaaatcactcacagtcctcaggcccatgtcaatccacaggagaagagacttgcagcagatgacccagaggtgcgggttctacatagcatcggtcacagtgctgccccacgcctcttcccacttgcctggactgtgctgctccttccacttctgctgctgcaaaccccgtgaaggtgtatgccacacctggccttaaagagggacaggctgaagagagggacaggcactccaaacctgtcttggggccactttcagagcccccagccctgggaaccactcccaccacaggcataagctatcacctagcagcctcaaaacgggtcagtattaaggttttcaaccggaaggaggccaaccagcccgacagtgccatccccaccttcacctcggagggatggagaaagaagtggagacagtcctttcccaccattcctgcctttaagccaaagaaacaagctgtgcaggcatggtcccttaaggcacagtgggagctgagctggaaggggccacgtggatgggcaaagcttgtcaaagatgccccctccaggagagagccaggatgcccagatgaactgactgaaggaaaagcaagaaacagtttcttgcttggaagccaggtacaggagaggcagcatgcttgggctgacccagcatctcccagcaagacctcatctgtggagctgccacagagaagtttgtagccaggtactgcattctctcccatcctggggcagcactccccagagctgtgccagcaggggggctgtgccaacctgttcttagagtgtagctgtaagggcagtgcccatgtgtacattctgcctagagtgtagcctaaagggcagggcccacgtgtatagtatctgtatataagttgctgtgtgtctgtcctgatttctacaactggagtttttttatacaatgttctttgtctcaaaataaagcaatgtgttttttcgg

SEQ ID NO: 1233 - protein, 76 aa, Homo sapiens
SKPIHQHEDRCLRLKVTVSGKITHSPQAHVNPQEKRLAADDPEVRVLHSIGHSAAPRLFPLAWTVLLLPLLLLQTP

SEQ ID NO: 1234 - DNA, 55875 bp, Mus musculus
  misc_feature (1)...(55875): n = A,T,C or G
gttggcctcagcactcgacctccaggctctgaggtggagtgtccagtgactgctccataggagggaagcatgagagattagcttctgggtctgtcagctttggcacatgagcaatatcctccgctgtcggagtcagttctcagtcttggtcatttctgttatcaccctcaagaagacttttttccaagtcagaagagagaaacagagacaggctcttgcatctgtccagcctgagcctggcagacatctcattactatctggagaccagagatggagaggggaggccgaggagacagctcccagatgtgtgtgtacttgatcccacatgtgttgtggctgtctagtgtgaaggagttttaatccaacaacatggctactctggcaagagatcacattcaaagaccttctaggtctgtgtggtccagctggaatacagacatacctttaatcccaggagacagatgcaagcagatctctgagttcaaggacagcttggtataaagcaagtttcagataaagaaaagctcaggttctgtcatggtgacacatgtctttaatcccagctctcaggagacagaggcatgcagatctctgatcttcagtcagttaaattcaaatcagtcagtggaacagtttagagttaaggagttgagaggtagtgaatagagtggaatgtatggcagttcagtttgtcaagttcagagacagtttttatggggacagttttacaaagagggttgcagagagaataaactagacacatggggaagacagaatgagccagagaatgagaaggagccagaagattagaacagattgccatagttagtttgaggccaagcagaacattttttttttcgagacagggtttctctgtatagccctggctgtcctggaactcactctgtagaccaggctggcctcgaactcagaaatccgcctgcctctgcctcccgagtgctgggattaaaggcgtgcaccaccacgcccggccaagcagaacattttagtgagaagctgacagaagtcagattgaatcagtcagcttggagaggagtttggggccagaacagctgagctgaaccagccagctagagcgcagaaataacgaggaaggatgatcttagcagtaagcccctgagaagacaattacatcatgtgaataaaagatacctttacaggttggggatgacagtactgacagccatggtagaggtagcaggtgagttgatccagtagataggataagaagaggcaataataatccgggcataagccaccaagcctaggctttggctgtttgctttgttcctgtggggctatctgtggggataaggactttgagaattgctcactggaacagaaaaggcagcgacctgaggaaacccactttctagctagagtggaggctctgaggattgacagttaatccttccctcaacactggaaagtccttacctggccctggtcagagggagagggtaaggccgactaggctgcagggagtaccagcatacgtcctgcttcctgtgatcaggagtgtgcacagggcaagggaagggacagggaggcgaggcacggggatggcccctagtgcatgtgacagatgacagttactgatgaactcctgatccttgtgcctcttcccccgagtgctgggagaatctcaggcaagcgcatctggcttcagttctgaacttccatgttagtggaagatatgtgggcatttgttggtggcttcttccatttaagttaagatctggcccatgtggctgctcacaattctctccagttccaggtgacccgataccatcttctagtctctgcaagtactaggcacacactagtaaagctaattaattaattaattaattaattaattaattaaacaaaatgtaaagattattcgtgctgtggcccagtattatcctgtcgtgtacacagagtgcctgtctccatggtgatggacatcacgggttcctgttttgactgttgtgagcagcactgctttaggctatcttatacaagtttagtgggatctatggtgtctttcctcttgggcatgcaccttgagatggagctgcttgatcgtatggtgactgtgatggtttgtgtatgcttggcccggggagtgacaccatttggaggtgtggccttgctggaggaggtgtggccttgttggagtaggtgtgtcactgtgggcgtgggcttaagatcctcatcctagctgcctggaagtcagtgttctgctaggagccttcagatgaagatgtagaactctcagctcctcctgtactcgataatggactgaacctctgaagctgtaagccagccccaattaaatgtcctttataagacatgccttggtcttggtcaggatgtctgttcacagaagtaaaaccctaactaagacagtgactgactctatgtttagtcataaaaagaacttctggtggtggtgcacgcctttaatcccagcacttgggaggcagaggcaggcggatttctgagttcaaggccagcctggtctacaaagtgagttccaggacagccagggctatacagagaaaccctgtctcggaaaaaaaaaaagaacttctgctgttttccaaagtggcaccattttgtattcccaccagcaatggataagggttccagtgtcttgtgcacatgtctaccactgagtcttatccctggttcctgcttaccttcctatctgacttgggttctagtgaagtaaaaagtttttaaatcctactacacgttactttaaagtcaataaacttagctcagtggaaccattttacaagtcagaaaagaatatagtttgtttaagaaagacacttttcataacagttaactgttaaataatgactaatgtaaataacaaagttctgactatttgattttgtgctttggggctttgttggtgactgtagtggctattcctggttgtcaacttgacaatatttggaatgaactacaatccggaattggaaggctcaccagtgaccctaatctggaggcttggagatccttatctggatattggtatggagatcttgagccatagtggctatggattccagaagattgaatctccgagtttaaggaacacacctttaatctgggctacgcctttcatctgggattaaaggtgtggtggaacacacctttaatctgggctacaccttctgctggagacaatataaggacattggaagaagggagtctagctcttgctcttgctcctttgcctgcttgctgcgtgagactgagtaactgctagatccttggacttccattcatagctgcgactgaaccattgttgggaattaggctgccgactgtaagtcatcaataaattcctttactatctagagactatccataagttctgtgactctagagaaccctgactaatacagtgacactgggtctcaatgagtagtcctggggcctggagctgctgctgccccgagtactgggattgaaggcatgcactgtcatatctggctcctttgttccttttgctgttagaactggtaataccactgtttgggaagtggaaactggagaaccaggagttcaaggtcatccttaacctcatactgaattcaaggtcagcatgggttacatggcacctcatctcaaaaattcatagctagatattagaataaaaaggttttttcttttcctaagaggggaatttccactgataagaagaaactagatggtaaatgcctctctttctgcctctccagggctagggttataggtgtgagcatgagcaaacatgtctggtttgttgttgttgctgttcttgacgttgttgcttctttagacagagtctcactgtacagccagaatattggctctttatgaggtcgggagatctaaactcaggtcctcctgcttgagcaggaagctcttagctgcctgagccacctcccctgtgcactcacatttcatgtaattgtgatgcttctttgcagttataaaaatctaacagtccaggtcatccagctacacagtgagaccctgtctcaagcaaacagaataaaataatgaaaacataacgtccagtgttacaggaggacctttataacaacacaatgttctgtaattagtgggaggcttataacttctttttgagatggttttagcagccccatctctgggggtgacgtcagctgacgatggtagagttgggtggaggttgctgaggatactgtaagcctccattgggagcttgagtctcctaggcaggcacttcaagctgtgctgccccatgtttgcccacaaaccccctctcagggagaaggcagcaaggtgtgtgtgtgggggggggggcatggaggatggcagtgtagtgggtgagtcctggtgtggtcacagatctgccagtcagcctggctttacctcactacttccctcagagctatctggcccttgtgacagatccacacacaggtgaggagagaatacagtgtcccttgctgagaatagaagcaggcctggaggatggtgtgtgctcttagcagactaggcctggaggcaggtttaaggagatttatttaaaaaacaaaaaactggtggggtagagtgtgatgatgagtttctttaaccccagcactggggaaacagaggcaggagggtcaagaaaaactcaaggccagcctcagctacctgaaaacctgtcgaaaaacaaacaaacaaacaacaaaacaaaaacctcactcaaacaacacccccacctgtaaccaggatagccggtgtcttagggctttactgatgtgaacagacaccatggccaaggcaactctgataaggacaacatgtatttggggctggcttacaggttcagaggttcagtccattatcatcaaggtaggaacatggcagcatctaagcaggtgtggtgcagaaggagctgagagttctacaacttcatctgaagatggctagcagaatactgacttctaggcagctagggtgagagtattaagcccatacccacagtgacacacctactccaacaaggccacacctcctaatagtgccactccctgggccaagcatatacaaaccaccacagctgggattccacatctgttgtccacattcatctttagaaaacagttcacttatgaagtcctcggtttccttgtcaaataagcaagagaagcagagcctaagactacaaaatcccttttggagaagactaaaaacaatcttacatcttttctttattctttaaggcttctaataggcaaactttaaggagcttaactttaggtaggccagagggtgaacagcctgaagtcgcagccctggggaggtgacagcagtagggttgcaagtctgagcctgcctgggctccaaaaggtttaattttttcaggtcaaaggtaagatgggcttgcttgctggttgagtcagccaagggtttctccctctaggggacatgaacggtagctgcacttatgcagaagggggattgagtctgggggccccaagaagcgtttccctaaaccaagttctataactccctcttccctcctgtgcaactcctcagtgcctgctgtggtgggctagacaggtgtcccacagtcagtcctgtgtctactgagacctccctcagtgagagtcctggaccagacctcagcctagtcttgacagcagctatggagtctttatcaaatcacttcacctctctaagcctatctgactctcaggactgagaaactcaaaagcagctatattcttgagaaagaaaaaaaaaacaacaaaacaaaacaaaacaaacaaacaaacaaaaaaccttgcacaatgtcccaagagaagtgccctggtttggatgtgaagtcctgtgttcctttgctgcagtcacacgggcttgtctgaattccctgcacagggtactttagcctcacctgccgttcatttctgcttcctggaggccagatgtctccattcccaagttgagatttatctgatacactgttacaccaataggagggtcttttcctggagttggcaggcacccaggaggggctggtaactcctggggacaggtagcaggagtctgacttggggtgggaggttcatggggtgggggttgtcagcaaagctcatacacacaggtttgatttctctcctccttaacagtgttgtcgtaacaacctggaatgttggctggaaaactgaacttccactaagtgtagagttcagacagcctccaaggaggaaagagactgctcagagccctgaggaatgtctttccttaccttagatagagatcttcagtatgtgttgggcccttcagcaggagatgcagagatgagttcttcagggtgacagggaaggcagggtggtaaacaaagtcacatggcatttgggaggaacacaggactctggcacccaagctaaccagtggatgacagctttcttggaattgaggaaagagaccattgagttttctgaaaaagacagccaagtccaggtttggcttttttttttttttttttttttttttttttttttaacttgtggattacgttgggcccacacttggggtaattttatctttccttcctggatactgaggatacatgtgttcacagctatgcttggctttttttttttttaatagggtcttgtccagcgtggccagaaccttgccacgtttcccccttagcctcttcagtgccagaattacaatcatccaccaccgtgcctgtcagagacgagtgtgagggcagagtagggtgtaagactaaaggaaaggaaggcctggccagaggataagcttgaacaaggcatgcagattaaaaaccacggacatcattgtagaaacttacctacacgcaaggctctggtacaggaaagagggtgggaaagtgaaggtggactctctgtgtagccctggatgacctggaactcactctgtggaccaggctggccttaaactcacagagatatgcctgcttctgcctcccaagtgctgggattaaaggcaggagccatcataccaggacttgaagcacaacactaatactttgtatattataaattcttaccacacaaatcagtaaaaaaggctctgagatgaagtagaaacttgagttctttggaaagtcagttgtgtggcatggtattttgctggggcaaacatgtgacatgaaggagtattttcctgaagcagacacaaggtaaaaggatgttttgctaaagcagacccgtgaaaggacccatgatgtaggattcttctctaactacatgcaaggatcagttcaccttacatttcattgttgagctccatttgttgtgactccatagagagaaacatactggaaacgtttctagtggtgttctggtggcttcttgctgcttccatggactcgggcagagtgatgtcagctgatacagactcaagtggagttttgctaagacagactcacatactgaggcgagacccatttgagaacacgttatgtttggagagcggataactaagactcaatggacagtgggaaagggcttgcttgcatagctagctttgcaatgcttcctggtcttcttcgctgatcttcactttgttaagagaagtaaggcaaagaacttctccaggcctaatcactcctgctaactcatgcagattcggccgaggcctggctgtttctgctaggttgtgccaacactgctgttgatttgtgtttgttatcctgacactaccgacctggactgctgctatattcatcaagtatttgcaagtggatgggatttgctccaaagaacaatttctagacagatccacctcctaatatcctaactacctaattcctgtatcctaataactttccatttccactgcctctaggagggaggttaaagtgtttaaaaaccatcattaaaattagggttgagaaatatctaaacaacacagagaaattaactataacttgcccaaatcctacagctatcaagcagtagacctgggatgggaactaaactcatctgactatggaacacccccccccccacactccaggatcaaaacggggtggatggggggaagccacttggccagggttgccgggtcgtgtctgagatgtctgctcttgccttcaacattccttctatctgagctggcagccttctgtagccttcctgtttcaggccagcaacttgtctctctgcaattattttcaggtctctgtttaccacagaaaggaaggaggcagcacaatgagagtctgttggaaattaattatatttttaagatagggcaagttccactatgcttgcctcgaactctggatcttcctgcctcagcctccagagttttgggattacaggtgtgtactaccacatcctcttgctatttaatcccattttaaatagcaggagaaaaaaatatgtattttttttagacagggccttagactcacagctattcacctgcttctgcttcccaaatgcctgccccaccacagggagagagaacaaccatgcctttctctccgacttatagcgtggctgaggaagtgccatcaaaaccaatcccattgtcctgggtacaggtttggttctgacatccacagagagcggtggatgcctaggtctgaggccagcatgttgcttaaataaggtcatgtcttatttaggggttcagccagcacacacacattccagttgccccatggactctaatcagctgaaccctgaaatggaagaatacattaaaacatactggtgtaggtccagggctccccatctacattttcttttctttcttttttttttcttatcccttcccttctccctcttgctccggcccggctcgctcaggcccataggttttatttgtttctcattacagatggttgtgagctaccatgttgctgggatttgaactcatgatctccggaagtcagtcagtgcgtttaaccgctgagccatctcaccagccctaaattttcttttcagtgtgtttctttccctctgcatttgcatgggaagctgccctgtagcttcaagctctgtagcttggaagggaaccttggtggagtctggtaaatagcaaacgccggttcctttgtgtccagtcaagtcatgatgggtaatcaaagccctactccttgttgagcagttaggctccaggtacatcgacagtgtttccaggaatctttatcatgggcttaaaaatacatctctaataggtgagaaaactgagacttccggatcgggatagcaatcttgaggagggtaacacatgtgtctctgggccagactcaaaagcgcacactggtttcgttgcctctgcagtagccttcaaagagctgctcctccactggaagatgagaggaaatctttttctcaggttatggacgcctaagttttccttcagaccaattaaatcacaatctctgggctcgaagcagacatcggtgtcttttcggattccctgtttgattcccgtaagcacccaggacactgacctgccttctactttaacagccagagccactggctggcgctcatgaaagcaaaactcaagcggaggcgcggatggaaggaaggagggggatatttctccttatctcagcgtcaaaacctggggaggggccctggtgggggtccctgggggctcaggtgtggcgcggctgcaggaagtaaccccctccggtggcccggagcgctggccgattgcgccatcctactgggctttcgtaaccgcgagccggggctgccaagaggagcttcagcaccggttcctcaaatgtttcactgttgccaggacggccggctgctgtgtgtcacgtgcatgtgggaagtcgcgcccacaccgatctgagccacgccggggcgagcgctcgcagtgcgagctgagtgtggagcccgaggccgagggcgactgctctcgctgccccagtctgccggccgcccggccccggctgcggagccgctctgccgcccgccgtcccgcgtagaaggaagcatgctgaccgtcggctgcacgctgttggtcgccctgctggccgcgcccgcggtcgcgctggtcctcgggagctgccgcgcgctgggtaagaggaacccggagcgggcgtggggaatgtgacactgtctggttccgttcgcagagtgagccccgccggtaccggctgctagcctgggctgactcacctgtgctgacgcggtggaggttcgcgcgccccctgttgcgtctagcgcctataactgcgtgctcctgtctgtgtctggccagttacctcaagtctgagtacaggacagtgtgttttcctgaaacctgactctggtgtctggttcccagtgttcccagtcttactcaactgcatcccgggtcgctccaaaaagagatacccagagggcgcgccctagtggaacagtagtagtcccttctggagagtcctttatgccactggctctctctgctttagttgtggcacctcgcgtggctttccttagttctactacattccatgtcgtgtgtaatgacagtgacccgacggtgaagggtctgacatcatgggctctgagtcatgggtgttcccgcctcacaaacttactcctttagccaactagccctagcatgcagaatgccaacacccacatccatcccaatcctgtgagtttgacagcaaaggatgtgggacctcttggaactgtgcctccgccccctgccccagccctccctgattagcaggtggaccaggcggagggtagggtaggggcactgtgtttaccttccttgcactctgccttgtaggtctaggcctctctgtgggctctggcttcaggcccagcagcctgcctggtctcttctggaggaactgggagactgcttctctacaggttattttaggggctgagggcttattcaacaacatagaaagagccaaaggacatgggggagatttatcctgtgctggtcgtggggacagtggcttccaggctttctttctgcctggaaggtagaattcctcaagcttggtttgttacccctacctatattttctttatatatatatatataaagaaaatatatatatatattagacaggctctcccataacccaggctggcctcaaacttgtgcctcttctgcctctatctcttgagtgctgggatttcaggtattaacccaccctgtattttacacgtttttaatcctctacaggattgacataaagctttgggaggagcctgaggttcagagagatgcaatgggaagcatcaggcccctccgtgtctcagtgttctcctgtgggtacagctgagggcgtctggggtaggctgagcaccactatcatctggtgggattctgggggagaagacactgatgaaagagaagatccccgcttagctgttcatggtgccaggcaggactgaggtcctctcttccatcttgggagagcaggactgggcctctctgcctgtctcagttactactcaacataccccagcgcccccaccaccacttccctttgttcctaaggagctgcaaggcacttcggagacagcgagttctgttttcctgtggttcagaaaggacacccaagggtgggggtgtcttctgacccaaacagcctttagaaggcagaactgggagtctggggaggaagtgaaagccctgccagtttagaaggaagaggcagagaagtccccagcccatctcccacacccacacttgcacagctacaaactggagagtgacaatcaagaaacaagcaccaaacaggaagtgtggagcaaatgactgagatgtttggctttagagaagtgaggccagatggagatggctctctgggggggaacccatgggtggaagatatacataaacatatatatatgggcaggcgagatagctcagcacacgcacacacacacacacacacacacacacacacactctcctccatccatcatccttagtgggtttttgccttcatgtattcatgtctgtgtgagggttccaaatcctatggaactggagttacagttgtgagctgccatgtggtgcagggattgaacctgggtcctctggaagaacagccagtgttcttaactgctgagccatcactccagcaccaacaggtgggattttcatagtctgcccctccagggcctgctaggactcctgtgtcttcttccacctggggcccaggaccagctgggactgaggcttctgccaggtcaaactttctaggcgctgctgactgaggacaggctgggcatgggtggcttcagtccccctttccttctgtaaggcaagaaaacacgcagcagcaccgatgcctatgtatctaaatctcctcctgacttctgaattccctctgggacaacctctttcggtctacaaaacctacctgtattcctagcctcaccctgaatcagtatttttctgaaggatatattttttatctagcatcaaatttcggctaggaaggatagatctttgtaaaaaaaaatcacaatttttaaaacattagggtttgtgggttttttgtttgtttgtttttttttttttttttgatattttgagacaggtgtttctttgtgtagccctggctgccctggaactcactctgtagaccaggttggccttgaacttagaggtctttgcctcctgagtgctgggatcaaaggccacggtacccaaccaaaaatgacaattcttgacccctggccactcattaaacatgtatcagaagagcagagagtgaggtctacactttgaaaaaaaacaaattgttccttgtggcccctgggcactggcttgaggacatttgcctaatggtcaggatgagtaaaagaccttcttcccctgccaggttccctgtgaccagaagcctctccccgccttggctctgcccctccccttgtttattcgttgcaacacatatttatgtattccctgtaaagcccttggggaccaagtgggatccgtcatgcacactccaccctataaaggatcctgaatgtggccaaaagcaaatcctgagacagagccagttcagtctctctgacctgacactgggtaccaactctccagggacagattgtctcagcagtcagctagacagaggaacccttctgactgggaccctaaagcaacaggagcctgcctgttctctaccccatctgactggcatcaaactgtgcaggcgcaagtgtggccatagctgggttatgtaaacaaagtaacttcagagcttctggcttcaaacagatgtctccttcagcaagctttccatctgcccctgcaggcctgagtgccaccactcagtcatcagcttgaatccagggctaaagctatctcagatgagccagtaagtgagtttaagctattaaaccttaaattaatagaaaaagtaaaatgggcacatgagatggctcagcagataaaaaaaggcatttgctgnnnnnnnnnnnnnnnnnnnnnnnnnnnnnnnnnnnnnnnnnnnnnnnnnnnnnnnnnnnnnnnnnnnnnnnnnnnnnnnnnnnnnntgttactcccaagggtttctgtttctctggcctctacatatgtactgtggctagtgcatgcacataaacaaacaaacaaataaatgtaattaaaacaaaagctgtgtatggtggcacatgcccttagtgccagaatctctgtgagtttgtggtcagcctggtctccacagcaagttcaagaaagaggaaaaaagggtgatttctagatgtgcttgatggtgtaactcatatgggaacttgatgcagggggattgcaagctctaggttagcctaagctacagagacagggttggggtgggggtggggagtaggggaaccctcaaaaaaaaacacaaacaaacaaacaaaaaccaggacaaatctctgtccttcatcacgcctgtcacttgcagtgcgcagtggctagctgtggctggtgtggctgtgcatgtctgctcatggggctttcccatagcggaggggaagtgtgtcgggtgaggggctagagagctatgcggtgtcttccagacacctgttccacctgtatgcatggtgctctgagggggcattggagcctctggaactggagttacagatggttgtgagctgtcttgtgggtgctggggatcaaatcctgcttcattgaaagaactctctctttttggagacaaagtctcaccacgtagccctggctggcttggaactctctgtgtagaacaggctggccccgaatgcacagagagcctcccgcctctgtctctcaagtgatggaactaaaggtgtgggctcaggaggtcatcagtgacggtttatcagtgagctgtcatctttctagtcccagagctgacgctttacctgaacctcagcagctttcaccattgcgcttgtctcttgccagctctgtctgcaggtttctagcacagggtgctcctgaggccccaacccaggagcccgttctctgactcacttctctccctacctccttccagaaaatcattctttgggcttccctttctgtggtggttacagtaactgtggctctgagtatcaacttcatttgaaaaattgtgtcagacccttggcacaacagtgcagctttgggtgagtggggtgccagcccgctcttggctggacagggtagctacaggacagcaggtggggttggatgagtgatcagaggccattctggggcatgtgggaactgagacatctatagcacaaccaagaaaggatgctaaatcaggtctggtggactgcaggtttcttatcacagtactcaacagagagaggtagaagttcaaggccagcttaggttacatgagacccccggaagtaaagtgtggggagagaatgggagtgagaaatgcctatggatccctaaaaggagtcagcaggaacttgggagtgagacctggacttgagagtcacctacaggcaaatccctccatacacacacatccctttttctcttctttaaacagttgcctcgtgtttcccctgggactgaccttggactcatgctggccctgaatgcacacagatctgcctgcctctgcctcctgagtgctgagattacatctggccagatgttactttaaacttttagaattacccagcccagcctgctcaacaacagaaagaataggactcaggggccggagctgaggtgctggaaccttctgatcagaggagacagaattaaggaagactgtgaccatgaagtgaacaggatagtgtaaggaggactggtgtcttgagaacccaggaggacactgtgcccatgagtggagtgttctttttgtttgttttgttttgtttgtttgttgtttggtttggtttggtcttttttccagacagggtttctctggtgtccttgggaactcactctgtagaccaggctggcctcgagatctgcctgcctctgcctcctgagcgatgggattaaaggtgtgagccaccaaccacctgctcctcctcaaatactcctgacaagtcaggcaggctgacccaggcttgaccagtgggtttaacaacaggcaggccactgttgttgactttggtctgtggagctttggaggaatggtgggagccaaagacaggcagagagacagcaggcctggtcagctcttttgggatttcagagcatatttgttggctacagttcagttgacaaagaggagttttaaacagactattgagacaggtgtgcgggaaggatccagggacaaaatgattgaaaaaagtaaatactggccgggcatggtggtgcacgcctttaatcccagcacttgggaggcagaggcaggcggatttctgagttcgaggccagcctggtctacagagtgagttccaggatagccagggctacacagaaaaaccctgtctggaaaaacaaaacaaaacaaaaacaaaaacaaaaaaaaagtaaaaactggtggaacaaagtcctcgagtaagtagtgaggagacaggggcccagaaagcctagaaactggtctgcgatcatacagcaaggttgtgacagaccgaggtctgtgcctgcatttgagtttttgttttatagtgtgtgtgtgtgtgtgtgtgtgtacaggcaggttcacaagcacatatgtgcacatatatgtggaggtcatatacaagacacacatgtgaaagccagatatggtcactggtgtcttctattgttctctggtttatttttctagacagggtctctctggccggccggccagcttgggggaatccgcttccctcggcccctagtccttgtaccttcacttggctttcagaacacacacccttgtgctctgctttttgcacgagtgctggggcctgaactctggtgtgtgtggccagctttaccgactaagccgtttcctccgcccccgcccccttatattatatatgtgtattgtcaacaagcacaactcttccagggcacaggtacaacaagatcatttttcttcctggtgtccttattagagacttagggatagtacactgatgagtgtcaccaagatgatccccttcctgtcccaggaagttcccattgccttcttctaagaactgaagaaaacactcctggctgtgatgtgggttcgagctggtgtggtctcctctcaccctgccctcagcatccattcacatcacttttagtccgggggaggttttgtaagcacaatggactcttccatctccaggagaggccccctgggctttagggtttagaagcctctggggatatcactgtagacctccaaagacggaacagtagtttctgatactgaaacaaaccaaagtagagcctcagctgctgccggtcttatgcgcctgttttgataagaggcagaggctgtggtgtgaaggctttgtcgcaggagtgggaaggaggccgcagttaataatagttacagttcacacagcagctcagatgggtgaggttaggtgtgtcctgaaagcagcgccgagggtttcacctcagccctgacatgagagtaatcctcacagcaacattttcaggagagtacggttattatcttcgctctgtggctggagaggtagaaagtcctagaacttgctatgtaaaccaggatggccttgaacttgcgataatgcccccatctctgcttcccaaattctgggattatggatgtgtgccacctaaacagagtttatttatttattcactttagatatttcattatatgaatacatccacttttttgcccagcccctttcctacgttctgggcatggaaacaagggccttgctcaagaagggcaagcatgctgccaactgagctattcgcccacacccaatctctttagaaggacatttgaccacatcccacagtgctgttgcagacagtcctgtgggaatgatttcagcacccctcgcacttccaaagcatacccacagggtaaaggcctccagggtaactgacagttcaaatgcccacgagctttgtaactggaaaaggagaagtggtgtcaatttatgctccagcaaaatacaagcacgcccatgtccacaaactccctcggtgtgttattaaagtggcatctggtccagcatggtggcccacacctttaatcctgcactcagtaggcagactggatgagtctctgattttgagaccaacctggtctacagagtgaattccaagccagcagggctacaaggagaccctgtctcaaaaacaaaacaaacaacaataacaattttaaaaaaaccaaaaaaacaaaataaaacaaccaaacactggcctctcccaagaacagtctgtgctccttgcacacagcttctctgagtgaggctggatgggtgtttccctgtgcagcagacatttcataacttatttgcataatctgcctgcttatactgctcagttttgactgagctgtgggctttttcatattgtttacaaagctcttactatataaaggaacttggtcttctctgatccaagtcgtaaatattttccagtttgtcttttattgttctgatagcaaagtttttttgtttttccccacgcagatttgcttttgctttttttcattttgttttttaaacaaggtcttgctgtatagcccaggctagcttcaaacttccaagcctccgtctcagcctcctgagtactgggattgcaggaatggcccaccattctcagcaagattgttcttaaagctacagctgaatttatatgacctctgaatttctgtcatgtttagtgagatcttcttcatgccaatatcattttattttatttatttattttttaaaaatatttttattaggtattttcctcatttacattgccaatatcattttaaaagattctttttttccctttatttccaagagtttacaattaaaaaaaaactgcacctatacatctagcatttgagaaacaggattacttggagttcaaggccagctaagttacagtgtaagccctgtcttcaaaacctaaataatgtgtatattttaaagagactggagagatggctcagtggttaagagaacatactactgttgctgaggaccaagttgccagcacccatgatgagtggcttacaactgcttgtagatccaactgcaggggatctgatgctgtcctcttctgggatctgtgggtacctgtactcatgggcattaacacacccacacatctataagcacaaatatacatatacatatacacacacatacacaacacaaacatacacacatatggacacatacatatatacacataaccacacatacacacacatgcacacacacatacacacatacacatacacacacatacacatacatacacatacacacatacacatacatacacatgcacatatacatacacatgcatgtacacacacatgcacatatatgcacacatgcacacatacatacacacacatgcacacacacatatacaacacaaacatacacacatatggacacatacacacatacacataaccacacatatacacatacatacacatgcacacctacatacacatacacatgcatatacacagagatgagggagcgctgctgctccctccgtaatgcagagttttctggttctgagagacctgctggggctaattcataaagaggctgagctggggctgcagagctgggcacctagtgtgctgccatcaccaccagtctggactgtttgttttcaggtggtgtgtgtgtgtgtgtgcacatgtacgtgcgtgtattacatgttactataggtatgtgcacatgtgtatgcagatacagatacaggtgtgcatgtaaaagccagagatagacagctggggaggggggggtctttcctccatgattttgtgccttttttgagatggcggttcactgagccaaagctcattgattctgtggggctgactggacaaaactcatgtcctcatgcagacactttgctgactgagccattctgctgaccccagggctttcttccatattgttctttatcaaagacctacaaaacagtgcttggaagtctcctgtttccttctttctcttttcacaaacatggcagcaagaggaaaatgcaggagccagatcagtctcataacggggtcacagggaccctggagatgggcactgagctgtggctccctccatcctgctagaatcttaggaagagagaaacaggtcccaagccgtcagacaaaaggagctgggcggagagagaaactcttcagatcagtagccatggagggagggtgctgccaggcaccgtgctccaaacactgttgtctggatgctggttgccaaggcacagcaaggtctacagaggttggatggaagagaggggccagggagggagggatgatgaaggaggcatgtggtttcctgagataggctccaccaggcaacccattagattctccaggaaggcctccgggggtcatcctcgtccttgatgcccccaactgtccccagcacggtaggtaggcacagctcatactttcaatggcagggtatgtggctggccaatgtctacctaagccatcaccaccttttgatgctgcttggccactgtccttcctaactctgggctcaggatctttgttgtaagtccatccctggatgtgacaaggtcttctctttctcttctcttctcttctcttctcttctcttctcttctcttctcttctctcnnnnnnnnnnnnnnnnnnnnctcccctcccctcccctctcttctcttctcttctcttctcttctcttctcttctcttcttatttagtggacccacgctgtgtattatctgagctaggctgggctactactgtcaagataccaggacttttctgtgggatctaaaggaccctggaagtgaggggagcctgctgacccggagggagattcttagtggtggaagtcaggaagcttcaggagaaatgcagtgtgacccgagggagggatggctttcctccaagggcactcatctcatttgactcagctctagagctttgattctccttttgaaggggtgggcatgggagctgggggagggtgaatctggtagatttgccttgggatgtcttaagagagatatgtaaggttcctgcttaccactttctaaccaccttccagaaacatggaaaccctgactgtggtccaggttcctggttagatcctaagactgtggtcagaaatgggaagagaaacccttttatgatgaacttctaggaaggctgatggctgtggggtgaacacagactcagagcccagagctcagggcgtacttttggctacactggtctggttctctatggagcaagaagtggatcaagaatccttaggtttttgagtggtccctgtcttagcacctggatcctgctgcagcatgtcctcacagtggtttccagaccaacgccacttgagtccccgtgacagggagggcctcctctagcctctaatttcttctttacttaatatggggcagatgggggcagggcagcaggattgctctcagatatctctcctctgactagttcacactcttggagagataacctgcccagaccttcttggcctggggccatacgctgatctctgaaggctccagggaacccagtgtttttctgttttggagctagtcccatcatgagtctgagtgagcacccagacttacttttctgtgggtccacaggagcttctctcacaggcctcccacgcatgggtgtatggtccacctggtagatggggagaaaggctgagccaaggtaaatactgactctgtcaaatacaaggtaaatacaagcaggtacaaggagtacaggcccattagtaggctgcagggctggtgtcctgccaggagccattagtctgagaaatgtttgagagctaactcagaacagggcaaggcctatgacacagcctggagtgttgtctgcctggggcccgtaggctgtatcttggaggagtcacggagaagaggtcccggtgtggggcaactagggagagaaggggattcagaggcagaggagaggcaccacacagttgctgctagcacagggcaaaggaagaggactctagccccactcccggggtcctcgaggtgtggtaggcattgaagagacctctcccttcccctcacctgtcttcctcagaactcaggcatccacaggctcgatgaagcagggaagatatggagagagaaagcagaggaggggaaattagatcagggaaacaggatagtgagcagcctggggatgtgtgtgtacatgtgtgtgtgtgtgtgtgcgtgtgtgcatgaatacatatgtgtgcatgtgtttgtgaatacatatgtgtgagtgcgtgcatgcatgcatgcatgcatgcatacgtatgtgtgtgtgcttgcatccatgtgtggagggtggtggtcagagagaagcccctggggtcaggtgggagggaggctggcttctcccaactcatccatgcctagtgtgcatgccccttcactagctgtgagatttggggtcagttccttaacagtcccgtttcatttttgagagaagtcctcactctgtagcttaggctggccttagacaaactcataattctcctgcctcagccttccgagtgttgggatcatgggccgtatggtgcctaacttggttctttaacttcactaacctgttgcctcaacagtgagtcctggagtgggaatggtgacaacccctccacacttcccaagcccttcacacttcccaagccccccacaccaatctccttctttttctgtcttttttctctgttgctttgatactttgattttaaaaattattattatttttttattaattaatttatttattatatgtaagtacactgtagctgtcttcagatgcacctgaagagggcatcagatctcattacgggtggttgtgagccaccatgtggttgctgggatttgaacttcggaccttcggaagagcagccaggtgctcttacccactgagccatctcaccagccccttaaaaattattttattttattttatttttgatgctttgagatagggtttcttcacataaccctggctatcctggaacttggttagttgaccaggctggcctggaacccagagtttgcctgcctctgcctcctgatttctgggattaaaaggcatgtgccaccaccacctggctgcttttttttgtttttattaaaagaaattattttcatagaatatattctggttgtgtttttcctttctcccaacaattttcagatcacccctactccccaactccatattcttttttctcttcctctttaaaaaacaaacacataataataaaaaaaagaacccacaaacaaaacccacgaacacttaaaatcgcaaaaccacaaaaccagaaaccaaaatatgtaagcacaagaccaataagaccaaccaaaccaaaccaaaataactcttaagttaaatgggaccaaaaatggctacaaaattacccttgagtccactttatgttggccacctgctcctgggcatggggtctatctaccctgaagtgggaaagatgaacttttcctttgcaagagtgtactaaccgctgacagctctcggttagacgagggagctgtccactttcccctctcagcgcccgttcccatcaggcttggctatgcaggccctgtgtatgctgccacagttctgtgagttcctgtgtgtatcctgttgtgtctggagggtaccgtttccaaggaaacacctctggccctgacactctctccatctcctcttctgcatagtcccctgagccccaaggaaagagtttgatcctatttaggactgagtgccccgaagtctttctctctctgcacgttgactggttgcacaccatccaattgcatggccactcccttttagatggagatctttagtaccttgagaggactttcagtgtggatgccctgcaacccaagaggccagtagccaccacttgggctgcctgaagtggggccatggggtaggattagcaggcccatgttaagcccatgtcctcagtgacaggccaggcagctggttcactacttacataaacagggccaggaagctgaacttgtttttgctggcaagagcagcagtagcttcgggagaagttgagaaatatgtcattgtgtgcatacttttctctctggctattgacatttgcaagtttacatgaggagggagaggagctggggcaacaacaacagcaacagcaaagctctttggctttctggaaccagactttatcctagtggagagagccccactttccaaagttatgttttgaagtcctcagttgggggtgaggggaggaggcgtctactgtggggccagtgtcccagagagagaatgtaggccacacaggcagggaagcaaggaaggtagggaatttccctcccctagagctgtcacgggagaggaaaaacattcgtctgagggtcctggaacagcctagtcaccaactgtcccccgacccccacccagtgatcacccaatgaccatccacagatggatgatgtgtatgtttcaagttgggcattgcctgtgggaaacagaggtccctctgagaagtaatgactggggagtgatgggacactagataccaggagcaggactctcaggggcccccagaccactgtctgaactctcattgctcagagaaggcaaatgggccccatcaggggtctccacactgcctaaaactcatgggtaaggccaggtgctacatgcttacaatttcagccttttgaagcctgcggcaggaggatcactatcactctgaggccagcttagggccacatagcaagagcctgtctcaaaaatgaacaaaactaggcaagacactatagaagcctaaccctagccaaccagccagcaactaagctgtggctagattacacaccatgtgccccaaggggcaaggacacactttgagaaactggcagggagattctgcattctttcctgattttagtcccacctgaggtacttctgtcctccctgcagagtcttgttaggagcctgggacgcagtgacatgacacgttcctttctgcatgtgacatgccttggcaagggccaggaagactcacaatcctcaggtgcccgtcttcccttgtctgtgatgctctatgatgaagcaggagctgggtgtcgggagctggttcctcctcaaggtcattgcagggagaaacagaagcaggaaaagatgtggccgtcgtcatcgaggctggtacgggaggcagactggagcctggtctgcacataccgtagcaggggcctcctctgtcagcagagccagtgctgatccatcctcttggagggtctcatacaccgcctcttccctgtggggctcccttcctttcttgctgtgtaaggagacttcagaccccagccgtcccccaggtggctcccttctgaattccttaaatgtactgtgccccttttatgaactggttctgggcaatctgcttatcaaactcccagtggtttctcaaggccttctaaagtttctctttgccctctagaacgatttatttctcctctctgttctcagcatcaggaatatattttatttccaaatagccaggattgtgagtagttttaaggcccccaggaatctggagattggacaagatagcagtatggaagagtggggagaacacagccacagcgtggagcagatgtgcagtggctgctaataccctctcctggcggagacgtgtggcctcgtgtgcaacactgcatggaaaatgttgaatccttcaggaggggacaggtttaagcttgctgcctgactgtcacaggctgaacagttgctcaagggcagatgttgtgtgctctttgctgaatctcatcctgtgtagcagctgccacacctcacgctgccttcagggtatgggagggatcctatggtcactgggcctgtctcacaggaagagtgttcccggagtacaagcccacctgattccctgctgtgcctcctccagtggggtctactgaggcgaagtcctggccaccttcaaaagtgcgagacatccagaaaatggaggctgagcccaaagatggttctttttgtcccttccnnnnnnnnnnnnnnnnnnnnnnnnnnnnnnnnnnnnnnnnnnnnnnnnnnnnnnnnnnnnnnnnnnnnnnnnnnnnnnnnnnnnnnnnnnnnnnnnnnnnnnnnnnnnnnnnnnnnnnnnnnnnnnnnnnnnnnnnnnnnncccacccccttcaccccaccccatgtaatacctgggatccgtatgtctttgtttaaagaaaaaaatatatgagcaagattagactctttaaagcctgagaaagccaaattggtgttgtgcctattgtcccactcctactgaaggagtagggtgggtctctttagccaggggttcagagccagcttggggaaatgtagttacacctttgtctcagaagacaaagcaaacgtgcaaagctctatggaagagcaaagcaagagaaaggagaccttggtatcccatcctctgcctgggcagacagaggttcagggagggtgcttctgagactttcacattcgctgttcaaaagctgctactgaggctatctgaccactatgcaggagctaagggctgactcagagctgagtcaggaggccgagcagtgggtgggtgggaggtcaggctgtccctttggactggcaccgagctcttttgtcctggcctccccagtgagaacgtccttttgatctttaggcacaccaggtttctgagatcaaagttaaatacagtgggtttttttttttttccacagtctcagaagaaatatgtttttgaagcagggctgacgggcaccatttgcagatgggtttttataattaattgtcccggatttaaaaaagacagaaggaaagaaagaaacgggtgactcagttttaaagattcagaagaccatcagtcaagttccgcggcaggggaagtaaccattgtctgctctttatggctctgcttttgtgggaaggaaaagaaagattgtttgtggggaggggtcggtatttctcccaattacctgaataaatttgtcattgttctcaagggtagtaactgaacagtcctggccaatatgcaagttagtcaccaaccatgcaaaggtttctattgggagggaaagggatagggaagtggccagaggaatatttttcatggaactgacaagggcaggagcagaagagaactctgcagtgtcccctagctggaccccagtgcagggtctgcccactcggcttcatggaggactctgcttggaccaccggtggttctgggtgaggtgtggaggccttgtcgtatttcaaacaagcatggaatgagtgccgttgtgttccctggtacgaggcaagcaggaccttacggtcttacggtcatggctgcgtggtgacctgtgtaggcagttatgcatcgcttcataatggggacgtgctctaagaaatgtgctgtctgatggttttgttgatgtgcagatagagtagttacccaatccttgatattttggtcagtgacttgatgtggtctctatcacgaggtgaggcaagcagatgtaccacttgccagcataatgtggcatactcttttatagcaaaattttattattctatttaaaattgtgtgtgtgggcatgtgcacacatgcatctggaggctagcaattggcctagggcgtgttccttagtcactctccaccctatttgtttatttttcagttaaaacaaaatcagatctaaagccaggcagcagtgggacatgccttaatcctggcactcaggagcagaggcagaggcagaagcaggggcacaggcagggggatatcccagttcagagccagcctgtctagggggaaagtcacatctgtttatctaatgtggatacacatacaccatgacatgaacatgaaggtaggaggagttggttctcgcctcctaccatgtggagtctgggggccaaacgcaggttctcaggcttgtcagtaagtgcttccccagctgaggcatcccactggcttctgccacctcactgtgacagtgtctcactgaatctggagtgtgccaatccagctaggccagctgggcagcaagccccagggattctcttgtctccagctctctagctcagggatgacgggcgcttgctgctgtgcctgggtgtcacgtggggcttgggaatcaaactcgggtccttacactcagtgtgtcgaaccattttcccagctgtatttaaaaaaattcgtgtgtgtatatgtgtgtacatgtgtgtgtgagcatgttcatgtgtgtgtgtgcacatgtatgtgtatgagcatgcttgtgtgtgtgtgagcaatgcacacagatgcacacgcatgtagaggttagaggacaaatcttgaggagtcagttcagtcttgccattttggatccagggatcacactcaggttgtcaggcctttgtgcaatcgtctctacaaactgagtcctcccactggcctgatgtttttggtttattgagacagaatctcagttagcccaggatggcaaaagcccatgattttgaactcctgatcctcttgcctccatctccaaagtgcttggattatggcatttggtatttaaatgagaaggaccccaataggctcatgggtttgagttcttagtcttcaactagtggaactgtttgggaaggattaggcctctctctctctctctctctctctctctctctctctctctctctctctcacacacacacacacacacacacatacacacacacatactcctaaggtgtgatcttgttggaggaggtgtgtctctagaggtgggctttgaggtttcaaaagtccacatctctctctctctccccacttcctccttcctttcctccctcctcccttcttctttcccccttcctaagatgtaaagttctcaactactgctccagtgccatgcctgtctgctttatgatatgataatactgggttactctcatgacagcaaataaaatagtatctaagacaaaaatatagcagtaggcctggctaaaaaagaaaataggaatacatagtttaaaaagaaaaaggaatacattctaaagtaagcacacttataaccctatcattcagccacacctggtccctatgctatacctctatctgactcagtaaggtggtccacaccagcggtcctgcagacatatgcatgctgtggagtgacctcacggtggccatatcactggtcatgaactgcactagaattactgcagttctaattttatggagccttactctgtaggtggcctgtggttgacaaaaacatcttgtacccatgactagttcaggacagtggcctgagcaaatgccaaagaaagtatgagatgtccatggttgctgggctttcatccgccatgcactggtgctcccaggctgcactggtggtgccccagggctgccctgtgaattctgatagtcgctcttcagctgcagagtgctgctgccaacattgcaacagagccacctgccagtagagactctctttggacagcatttctttctttctttctcccttttttttttattaagatttatttatttattacatgtaagtaacactgtagctgtcttcagacactccagaagagggagtcagatcttgttacagatggttgtgagccaccatgtggttgtgggatttgaactccggacctttggaagagcagtcgggtgctcttactcactgagccatctcaccagccccatctttctttctttttaaaaaagatttatttatctaatgtatgtgagcatcctgtcactgacacaccagaagagggcatcgaatccaattacagatggttgtgagccaccatgtggtatctgggaattgaactcatgacctctggaagagcagacagtgtttttaaccactgagccatctctcccgcccctttggtcaatctaagctcatatatgttcaaaatatagacatgagcttgatgcttgtgttaggttttttcgttacagctgctttgtccagtggaaataggagagtaaggatattgatacattaaacaggagggccattggacctgctaaactttacctcattcaggccaggcacacacctgtgcaggcacacacctgtgcaggcacacacctgtgcaggcacacacctgtgcaggcacacacctgggcaggcacacacctgggcaggcacacacctgtaacccagcattcaggaggcacagacacaagtatcaaggtcctcctcagttatatagtttgagaccagcctgggctacaggagaccctgaggtatgcttacagcttcagaggttaagtccatgatcatcgtagagagaatcgtggtgataggccagcacggtgctggagcagcagcagagagctgaacatcctcatctggagacagcaagcagggagccgaggggaggaggggaaggatggtttctccatcaaggccacacctccagcaagaccacacccacagaaggccacaccccctccagcaaggccacctctcctgatcctttccaagcagtcccactaactggggaccaaacattcaaacacttgagcctgtggagctgttctcattcaaacaccacagcactggaaacaaagtcgaaacctcagataatggaatactaaactgaggtgacacccacacccacacactgtggaaacaggactggaaactgcacagcacaggagaatacatatgaagctcagagaccaaagggaacaaaagaccaaggggcccaggggtaaccaactgactctttaaagtagggaagaaaggaagaaggctagcaagatggctcagtgggtagagatgcttgctgtactggttagttttgtgtcaacttgacacagctggagttatcacggagaaaggattttcagttgaggaaatgcctccatgcctccaactgtaaggcattttctcaattagtgatcaaaggggaaaggccccttgtgggtgggaccatctcggggctggtagtcttgggttctataagagagcaggctgagcaagccaggggaagcaagccagtaaagagcatccctccatggcctctgtatcagctcctgcttcctgacctgcttgagttccagtcctgacttccttggtgatgaacagcagtatggaattgtaaactgaataagccctttcctccccaacttgcttcttggtcatgacgtttgtgcaggaatagagaccctgactgagacagcctggtaacctgaagtcaacccccaggtcctacatgactgaagggaagaattcccacatgttgtcttcttctgtcttccacatgtgccatggcaagtacaaccccatgatagatagatagatagataggcaggcagacagacagacagacagacagataatgtaataaaagttttaaaggaggataagctgccaaatgtaaagtacatatagaacaggaagttgtagctctgggaccagagacaccttcagagataacaattgccccagtttcaagggaatctcctggatgttttatgcttcataatttttatgagtattgcatatattaatttgcatatgttcaacaatgtgtaaaatagttacagaacaatgaaatactaaaaggatgtcattgaagaatgtgtacaatgcttgctagaaacaaggccttttgggactcttgggagagggcttcaaagagtcctctcagcaccatctgaggtttgggcttctcaggctctggagttgtccctcaggctattgctgtgagcactgtgtgacatctgctccagaggctgcatttctcacaggtggggctctctggagcccaaacctgtccctccctcatgctggagccttgggtgctgattggaagggggagggccttccttactcactgtgggtcagagaagtctaggaagcctcctcaatctcacctagttacaaggtaacatgctatttttatcttattttattttattttattttattttattttattttattttatcttattgagacaaggtctgactttgaagccctgactgttctagaacttacagagactctattaagattattaagtgtgacttcttgtcctggtctgaggctaagatcttcccttcccttcccttcccttccnnnnnnnnnnnnnnnnnnnncctctccctccccctctccctccccctcttcctcctctctctctcttttggatttttcaagacagggtttctctgtgtagctcaggctggcctggaactcagagataccctgtctctgctttccaaatgcagggatatggctggggctaacggctcttttcttttctttttttcttttcttcgctggttcttttcttttcttttcttttcttttcttttcttttcttttcttttcttttcttttcttttcttttcttttcttttcttttctcttctcttctcatctcttctcttctcttctcttctttttttttatggcaaggtctcacaatgtagctctgactgatccaaacttgctatgtagaccaagttgacctcagccttgaactctcaaagatctgttcacctctgtctcccaaatgggaggcattaaaggcgagcaccacctcacctgtctcttcacagggttttctatcaagggagctcggttgctggatcatggcgtgagaggatgtactgtaggagacagttctgtggtctgggaggtttctggaggccagacagatgtggtgtaggctagaccgtgggaggactccacagtcactgtgttactgtgaaggccttggacttctccaagtcatcacaaagtcccattttccagttgccaaggcttactttgtgtttttcttccccagaggtggcaaatggcacagtgacaagcctgccaggggccaccgttaccctgatttgccccgggaaggaagcagcaggcaatgttaccattcactgggtgtactctggctcacaaaacagagaatggactaccacaggaaacacactggttctgagggacgtgcagctcagcgacactggggactatttatgctccctgaatgatcacctggtggggactgtgcccttgctggtggatggtgagttgtgctgtcagtgtccttggaagtggctccgagggtagcttcaatgtcctctgcattccagaaagatcctctggctgatcttttaactttgtcatttttggctcaaaagtttcaggaaaagggacaccgctcggcctgtgcgtgtggccagccagctgtggaagccatctggcagatttaatagccctggactcccagccaggcacctcagcttagcggctgctaaccccctcagattcttttggcaaaataaagtgaactttattactaagtttccatgttgcaaagtgttacaaagagaaagtaagtgctgaaaactgcccagcacccctgaaacacacatgagactctcagagggagcatctcaccaaggattggcagggtaagggctccctggctccagtggaagccctgctctcagccacgttcttccttatgtcccgtgtagtccttccagtgtccgtttgtccagtgttaacatcaggagaggccacaggtgctccttttgcatctttgtcttttcaaccctttagagcagtggttctcagccttcctaacgctgcggccctttaatacagttcctcatgttgtagtgacctccaaccataaaattattttcattattacttcataactgtaacttcgttactgttatgtaaatgtaatgtaaatgtttttttgggagagaaaggtttgccaaagggatctcgacccacaggttgagaaccactgctgtagtcagccctttctctctgtgcctgggactccttggccagtatgtccctagggagtcctgtcatttgtggctctgagctgaaccaggtagtcccctcagctgcgggtgggggtggaggtaatgatgcacagagcaggtctgcttggaggccttgcaccccctcatcctgctgagtctcttgcagttcccccagaggagcccaagctctcctgcttccggaagaacccccttgtcaacgccatctgtgagtggcgtccgagcagcaccccctctccaaccacgaaggctgtgctgtttgcaaagaaaatgtaagtgtcaggtggggctgtgcactgagtctagttgatgcttgctgatgtcctagagccaagggaagcagggtggaaccctccaggcagctgttggactgagtggacagggaccttttaatttttctagatttattttatgtgcatgaatgttttgcctgtagcatgtgtgtgcaccatatgcacgcctattgaatctcatggaactgaggttagaggtggttgtgagccaccatgggggtactagcagtcgattccaggaccctctgtaagagcaacaagtgcctttaactactgagacatctcttcagtcccaggaccgatgttttatcagtagaaagtttttccaagtctgtcatataacatgtgtaaggccatgctttgattctcagttatttcaaaaattaaaaaaaaaaagaaagaaagaaaaagaaaaaaatccttaggaataaaggaactgggccctagggtcaattcaacttacctttcccgacagctgtgggaaatgcacgctgaagttcagtgagactgattaactcgcttgaggtcatctagctaggaagtggttctaagtgttgggaagagaacccaagcccattttccatcaaagtccaaaggttttgggtgttgtcctacaggaaagggacaaatggctctgggggcttggaatgaggctgataggcttctatcggtaccttggccctgtgagcatgataaagacaggatacagagagtggtcatgggtgggggggtgaggtgcgacccatccagacttttgcctgttagaagatggcatggagacctggggccagggaggaagaagaagtataatgtagcacgctagagaaattgtagtctccacccacaagccacgcctctcacgcctagatattcccaataaagtttgagtggtcagagtgtggtattccttcttatggatccttcttattgggtcctggtagttactaccgatcaaacatggccccagaatattaagtggaaattcccagaagtaaacaaaagcatgatttaaattgggtcattctaagtaaccccacccaggttgtgaatcagctccagctacctgtgctgttccacagaactcctgatcatctgcttgccagtatttgtgttcatcaagcctggccctaggacaagatcagacagtgatcaagagcacaaaacatgagagccagaggttcacctgggagcctggcagtactgcagggcattgggaaggcatggtgtaccagggtaggccctgctaccatgaagtctcaggtctctcaccgaagggtcttggaaatacccctagcagatgagggagaatttccacattacaaaaccagtgtggcgaccagcgcggtctgagcctgaggttcttatctgagtctgaggttgctcgcttgttttctagtggcagggaaagtggaagtgggtgagatctcaggtttccgggtccactggggtggtttctgacttcccttggccatcttcagtctttgagttcttttctattttccccatccctcctgttcctctttatatgtgtgctttggtgatttgccagcatttctgctatatcacctgagggcaggtcttttgtgccctgggacagggaagggcttttcctattcatttctgtgtgtatcctttatagttcgaaggacaagacccaggaagggaataagaccagagggaccttctcctccgcctgtccctcattggctgggctctgccaaagatcctatcagacgggcactaatgcctttagctttactattttctagggagaaaataaacacttgggttgaaaagcgtgctgaaagtcacagacactaaataggagcagacactggctgagttgaagcctgaaagctagaatcagttctcaagcttccaattcctgacttctttctcttgaaaaagaaacaaaaaaaatgctagaacctttgtgcccttctctgttgtgtcccacagcaacaccaccaacgggaagagtgacttccaggtgccctgtcagtattctcagcagctgaaaagcttctcctgccaggtggagatcctggagggtgacaaagtataccacatagtgtcactgtgcgttgcaaacagtgtgggaagcaagtccagccacaacgaagcgtttcacagcttaaaaatgggtaagggagctcccgctgcagctacttccttcacttcctgatccatccctgggcaaggcagggaggatgtgcagaggggcttgggagctgggtcttctgggggcattgctgataaatagatgaggagagcgggggttcttcctgtgagtttttgcttagcaggtgcaaggctctgaggtctgtttacactaaataaataaaattttaccatttctggggagtggtacatgcctaacagtggggatgtctgcggagcctttgagggtctcctctgtgcttgctcctgcatagaagccctattccctctccacagtgcagccggatccacctgccaaccttgtggtatcagccatacctggaaggccgcgctggctcaaagtcagctggcagcaccctgagacctgggacccgagttactacttgctgcagttccagcttcgataccgacctgtatggtcaaaggagttcacggtgttgctggtaattcatttcctttgtttggagaaaatgtttcaccctgtcgtagcctctacctcatgacaatccatcttccttagcctcctaagttcccaagtgctgtaactaaatagtgagcccccatgcccagctgatctagatcgaagcaggaaaatgcccctaggactgaggggacgtggaaaagaagtaaagtaggttctggtccagctttggcccctccccccatccttcatagtctccggcgagccatttaacttgatgagtggtggctctgtctttataaaataagactaacaatgccaggccagactcctgattggcctaagaagaatgctgggttctgtcacctacagtgacttcagaatgcttgagaaggactccacctcagcccctggggtgggtgagcctctgccaagcggagagcggggtggtcaagagtgccctctccctgtagcattgcctcacagaggccactgagactcaccatgtctccatcctcagctcccggtggcccagtaccaatgcgtcatccatgatgccttgcgaggagtgaagcacgtggtccaggtccgtgggaaggaggagcttgaccttggccagtggagcgaatggtccccagaggtcacgggcactccttggataggtacctgggtctatgtggagggaggatgggacagctttcagcttgtgagtctatcagccgtcttgcactgcatggcaaagcaggctaaatcagtcagtgtgcgctcttcatttcagttcattgagaaagggcttcattcagtccgggcggccttggaacttactttgtagtcaacatgaccttgaacttctggttctcctgcctccatctcccaagtactgggtcattctgtgtgccacagtacctagctctatttgcccaggtctggtagctcctgtgtgtgtgtgtgtgtgtagggtcaaggtgctggctgcccatgtgtttgatggtggagctcactgggtttctccttacccactacacgtcttctgtccttctagtaggtgagcctcgggtgagggcagtagggagggggtaaggacagaaggatgggaggagctccaaaggatgataggcatggttaattgactaaggctatttatcttcggaaatcaaccaataataatgctgtgagggacataatgaaatctcccaaagcatgagcatggtcacctttcactgctatgaccctgtctcgaaaaacaaaaaggatgaagcccacaacatgtgagtgttgagtgtattttaatccaaacctaaacgacatnnnnnnnnnnnnnnnnnnnnnnnnnnnnnnnnnnnnnnnnnnnnnnnnnnnnnnnnnnnnnnnnnnntatacagtatggacacacacacacacacacacacacacacacacacacacacacacacacacacacacatggtttttgttagagtcctagccccaactgtttcctttgctgcactatggaactcaaagttttatatatgataaagtattctaccactgatctatatccttggcctggtccagaaacagcttcttcaaaagtttcttttgtctaagtgtggtggtggcaaaggcactctgtgagttcaaggacagcctgatctacatagttagatcctttttcaaaacaaacaactacaacaaaaacccaaagttggtttgtttgttttttattgtggtacagtgtgcatggcgtaaaatttacttttaaaactcttttgcaggaggtttttgagaagggcctcattatgttttctgcccttgaactctggtttttacatggccttctttttttttttttaaagatttatttattatatgtaagttacactgtagctatcttcagacactccaggagatagtgtcagatcttgttaccgatggttgtgagccaccatgtggttgctgggatttgaactcaggacctttggaagagcagtcggtgctcttaaccactgagccatctctccagccccctttacatggccttctgattataggtgtgagccaccatgccttgttattataactgtttttgtttgttttgtgtttggaggccagaggtcaacctgccgtgctgtttcttgtatactctacccatcaggttttgctataagcattcccagtggcctggtgcttgctgagtgggctgggttggcggggcagagagcttctgggatgctcctggcccacctccctaactgtctgccccagtgctgagatcacacagccagcctccctcccatgcctgttctgttttttctaacatgagttctgaggcattgcacgtacacggccagccctgttttaatcgttgttcagtgcgttcgtcgtgcagcccatcactgtccaccatccatctccacatcatttgcatcttgcagaactggaatccctccaccttgaacagttacctcccatccccgtcccttccctagcttctgggacgtccatcctactttctgtttctgagtttgaccaccttaaacacttcgagtaagtgggttgtacggaaaccttttgtgtctgacttatctcacttagcacagtgccttcaaggtcaattcaaactgtggtgtgagctagaatttccttcctgttggaggctggggagtgtcccattgtacacaaacatcatgctgcatttccccaaatttgactgtggagcttgggctgcctctgccttttagtgtgtggctgataagagatagggtgttactgtttctggcctagaatgcacagtgtagaccaggctggtctcaaactcatggagatccacttgcttctgttccccaagtgctgggattataaaggttccacttttccttcaacttatcaaaactggcattctgtctgtctgtctgtctgtctgtctgtttctccttcccacttcccacgtgtgtgtgtgcacgtgcttgcatcaggagttggaagccatgcacataatacagttattttatacttcaagaaaacctttataactctctgtcatagtccctcagaggggacctcgggcaggaggaggcacttggtctagaagcccactgcctcagtttccctgctttaggaaacaaattgacatgggaaagtgggggagggaagtccacgcccacacccccctggtagctgtggccttcttgccttgctcctcgtttctttggaggtcagcttcagctctgactccttttacaagtgaacaggttggggtgtctgacgacatctcctctcctgctggggcttcggcaggaggtcacagtaactatcaggactggggatgctccagcaagcagagtcctcacagtctggactctgccagctacagatgatttgattctctccatagaaccctcatggggcttttgcgggttcaagggttctgggttgcagtctctgctcagtccagctctctccttagtgcacctcctccactctcctccccctgttccttttctgcactcttctcaaatcttccattccctgtgccttcacctgcagctggcacacagtgcttatttggtgtcgaatggacggtcatgggtccgatagctggctctgtcccttgttactatgactttggggaagtacctatctcagccccagtttggttatttgtcacttaggagtactaacacctgcctaaaaaaaaaaaacaaaaacccaaactcagcacctgcctcccggagccttgggcttcagtgacttggaaagtggcatttatagagcaggctgtgagctggctgtcacccaggactctactcctcctgcttccaacctccctagtgctaggattataggagtgtcccccagcccggtgccaccctgcccaatttatacagtgctgaggaccaaactgagctacacccttagatccaaagccggtattttaaagcttttaaaactgttcactgttggagccagacaaacttggtttacgccactttgggagctaaggggatgctttcctggggagagacagaagactgtcagggcttgctgtctgccagcctcggtccaggttcagggagagggaagtagacagtgatggagcagggcacttggtgttttctggcacgggacacatttgcgtgggcacacacataagtatgcacacactcacacacatacacatgggggaaataaacatgcaaagttatagctttgccactttctattaactttgagaaagttattttcctttttcttgcctcagtttcccccatctttacatgttttaaagatgtacttgttttcagtatgtggtgtgcatgtgagtgaggtgtgggggtcagaggagaccttccagacaaggattctctccttccccagaagctggggggggggggggagaccttccagacaaggattctctccttccccagaagctgggggggggggggtttctgaacttgtgtgaggcatcttgctggcaccccccatattgatttatttaagttttatttgatgtgtatgggtgttttgcctgcgtgtatgtcagtatgccacatgtgtgcctggtacccatggaggtagaaaatgcactgggtcccctggaactggagttacagaggatttggggctgctgcgaactaaacctaggttccatccaagggcggcgagtgctcttatctgctgagccatctctccagccccactccccatcttctttaaagtgaagattccagtcaaacacttgactggaatggttcacatctgtaatcaagcacttgagaggctacaacaggaggattgctgtgagttccagattggcctccacttcagaatgagaccctgcctcaaagatcaaaacagcaatgacaaaaacactgggcattgtgtcctgtgctggtaatcccagcacctgggtgacaaaggtgggagagttaacctaaattcggggtcagcctgaattatatagtgagttccagggcagttgagagactaaaattatgtgagactaaaattatgtgagactttgtttcaaaaccaaacaacatcaaccaaaaacaaaacaaaacaaaacaaaacaaaacaaaacaaataccctttcaccacacagaacctgtggggagcctggcatggtgttttacacttgtaatcccggtatttaagaaaattgaatttactgggtagtggtggcacacacctttaattccagcactcaggagacagagtcagatggattctgtgatttcaaggccagcctggtctatagaggacatccagggtacacagagaaaccctttctcaccccctttcccaacaaataaaaaattaaaaaaaaaattgaattcaagatcaaaggtcaggctggtctacatagtaagttccaagccatctaggctatagagaggccttgtcttccaaagccagtccatccattcacacatgtacacagtcctagtgggactcaatgaggcttgctgccagggttctgagacctgtagggcaataaaaaggtttttaaggacttgaaaaaggttccatgtgatgttgaacttgtctgggtctggggaacctctgggccgaatggccatcagttcttggacctatttttctctttactgctgcagtcatttcctggttttagctttgaatctagcagcagccaaccacatgctctgttgtcctgtgtacacccttctgtacacacccttctgtgtacacccttctgtacacacccttctgtgtacaaccttctgtacacacccttctgtgggttgaactcagctcattatgctaagttgggaggagcacaaaggtaggaggtgctgggtcctagccacaattagaagttcaagtctgagttaatttgctttgtgaacttagacaaattacttcccctctctgggccttctttcaacatctccagggttgctgtgtgcttgtctctccttctggaggtggtggagcccattggaaattctctcccaatcagtaacaggtcaccctgtcctctgccccttagtgatatgttattctccagagttggggacactgaaagtcttatacttggtggtatttttaacttcttagtggaaaaaacgctgagatgacgagagattctgagtcattccatcccttgcctggcaaggttcagagctggtccctcaggccccattctgggcctgccctcaagtttgatttctgtggaaggcagttcccatgaagggagtggctgtccccgactcctttttatcagggtgtctggctgatcccaggcacgagtcacttcatatattttattgcaaaaaggcaaactcaaggaattactgttcagagtgcccctatcttgcaatgtgtatcaccctggcctttccctttctgtgtgtatatatatatatatattgcaatatataacatatgataatataaacgagttttagaaactttggatcaaacatgtcttttttaaaatatgttatagtatatcttcaaagtttttccttttttttttttttttttttttgagacagggtttctctgtgtagccctggttgtcctagaactcattttgtagaccaggctggcctcgaactcagaaatccgcctgcctctgcctccagagtgctgggattaaaggcatgtgccaccatgcccggctccaaagtttttctaaagtccatattttgaagtatttatttattattttaaaaagatttatctcatcttttttcattgatttttttttttcatttttattgtatgtctctgggtgtcctgcttacacctatggccgtgtgccatgtccatgcagtgcctgcagaggctggtcggatggactgaggaggcatgggagttgcagagggttgggagccaccatgtggttgctgagaatcaaacctgggtcttctggaaaagcagccagtgttcgtaaccacttaaaacttgaagttttacttttttggtttttgttttgtttccaagacaccatctccttgtgtagctctggctggcttgggatgctctaggaagaccaggctgacttctatttcccaagttctgggcttaaaggtgcgctccctgaacttgtatttttagtagatacagaataatcaggcatagttgtgggaacatgtaatgttttgatacacatcatgcaatgtgaaacagttttgttttgttttttttccaggccactgtgtaatatggctttatcataatcgacatagctagtcccctaatgttggagagttctgggttcttagcattctgcttaaaaaatatattatggattttattgaaaaaagaattttttttttgagacaggatctcctctgtaccagccttaaactggaggcactcctccttctgggcttcctgagtgttagttagtgttacaggtggcaccattccctgcgcactgtgatgctctgggttgctctgactgggttccagggtccatgagtcactaacccttccttctaccagcagagcccaggaccaccccggcaggaatcctctggaaccccacacaggtgagcttgcccccagaaagggccagggcatgcactgccccaagtctggtttcagtgccagctgggtcttccagagatgtggccgtcaagtgccatctgcctggccctggtggctactgtttcatcccgaggtctttggataccactgacagcttagtctgagaccagattcaatttatcttagccctcccctgtggcagcctggtatcatgaagcattgggaagtggattatggctgaagctgcttaacaaattcctttactaatccaatttcccacctctctcctgagtggtccttaattccctcaacaagaagttcgagtctttgttctctgctcccaaaacacaaagaaggaagcaggggtctgggcctcacacacagggctgccagggctgtcctagaagggatgtcctcagggggctgtccttgtggggctatctggtgtcttcataggcaaaggcagatgagtccttgcctctctctcaggcggagttccaggtaggtcctaggggaactgacacgagctgagactggccacccattccactgtgtgggtgaaatctctcagatctagaagcagacggtaagtccacctggactcagaaatctgcccacaccacagctggctagggcgaagtgcaggtggggtgctaggaccggctcttcctgggaggctaccaccgtgcctggcaacagacctcatggacagtggctgtgtttaccgagcacatcctgtgtgtctttggcagagacatgggtggaaagaactccacctggcacaggggaagtgagcacacaaataacaccagtgacaggtggtcgatgaaggtcgggcacagagaggttcattcaggacacagaaaggaggtggtggctttgtggaagatgtgtagaagtccctatgaaggctgatggtgagggtcatctctcctaggtctctgttgaagactctgccaaccacgaggatcagtacgaaagttctacagaagcaacgagtgtcctcggtaagcgctagtgtcttgctattcctctggcctgcagaaaagctctcacttggacacttagcagctgatcagaggcaacgatcttccgttgttttatataagtctttgcagtactggggactaaacctaggtcttcatgctaggtgaacctgccacgggtgagctacagcaccagcttgcctgtcattactccatatgctcacttgccgttgtttgctacgatacggtgaggcccgtgcgaagagtggcacagatcaggaggcttatgtggtcagtccacagtatggctgagtagactatgagcgtcattgctggagaccgaaacagagcatccgtggaaggaaacctgtttgcatagctgcactggctcagccaagagcgagtggcctctctttagggactaggcaagaaaggggcttaggaaaggtagacagaacactctggccaggaagggagatctgtggggagtcctgcaggaggagggacatggcatgtctgtggcttgactgccaagttgggaataggccagagatgacatcccagtggagaaattgcttccaaatacttattgaaagctcccgagtctccctgactcggtcccagtgaccaccacagagtcctaggatcctccatctctcatgtgccttctgcctggagcctgggtaaaggataccgggaaagctactctgagcgtgaacggccctttggttggctgcagtgggcatcagccccatatgagctctcgaatggtgcagtctccctcagtcactgtgggaggagtcggtgcagtgcctcttcagagttctgctgccatcccgagctgctcagtttctagtaactgctgcctgactttcttttccctctttccttccttttgtcctgtccccttcccccgtcccttccttttttctatcattcccttcccctgcccacagccccagtgcaagaatcctcgtccatgtccctgcccacattcctggtagctggaggaagcttggcgtttgggttgcttctctgtgtcttcatcatcctgaggtgagacgggtcctgtactgtattgtactgtactgcactggctctgggctgtactcttgcgtcttagctttcatcagaacctaaggaactttgctcattcatttcttcattcaacaaatgaacatgtaacatgctgagtcctgggtcaggtgctgcgggaggccaggggacaggatgggtactgtgtagtgaggaagccaggccctgacaaggaagtgctgacatgggcagagctacagtagcacagccatggggaggaggaggaggaggaggagaggagagggnnnnnnnnnnnnnnnnnnnnnnnnnnnnnnnnnnnnnnnnnnnnnnnnnnnnnnnnnnnnnnnnnnnnnnnnnnnnnnnnnnnnnnnnnnnnnnnnnnnnnnnnnnnnnnnnnnnnnnnnnnnnnnnnnnnnnnnnnnnnnnnnnnnnnnnnnnggcagagacttctagctcctgaggccctcacatcagccctgagctggcctgacaagaaacactgagaaccgcatcaggctgtgctcagctcagggctgttcttgttctgatcctcattttcagtgctggagttcgaacccagggctaggcaggagctctggctttgagctatgtccctggcaccaaattatgattttcctgtgaaggaatgaaggaggaaacgaaagctgaaagaggcagtgtgggtacacccagtaaggagcacagggcacaaagcctgcttattggatggggccttaaggctcatgcagtcaaattctttaaccaaccaataaggaagcggccccaagggttgtccaaggagccagggctgcatgacactagcctatggaccacgtctacataggctgaggtaacccagttggccccacgaagcacttatatgtgctaatagagaagcatagagaccagtttgcttgcctgtttcttaggctcagacactggctgctggcagcccctgtagccccggagccactggctggggacggacgtgccggtgctaagaacacactagcaattcatttcctacctgctgagtttctactttgttccatataaggcagatttattagtaaaagaggccagtttgtttgttttagtttagtttttttttcttttctttttttctttttttttgagagagagcgaagcccaggctggtctcaaactctttatccccctgtctccacttcccaagtgttgggattataggcaggtgacacttgcctaataaaactagtaatttcaagtcaggtctggtggcacatgcctttgatcccagtgctcagaaagcagagacaggcagatctctgagttcaaggccagtctggtttacaaagtgagttccaggacatccagggctacacagagaaaccctgtctcgaaaaaccaacccctcctcccctccaacaaaataaaacaaaacaacctagtaatttcaaataatgaaaacatcctctatcttttaagactccttagcaagaaaagactctcacttagagtcagggagttaaaagccggctgagccacagcgactgggttgcacgtgtgggaggcgtttgacgttttgccagtcaggatagcatagttttagaacatttagtttatatcccgagctaaatagttttctaaatatttctctagcaacgttagagaaaatgaaaacaactaaaatatactaccatcaaaagtttgcccttccttagcaggaggtcacaactgcagggatcagttctcccaggactgagaaaacgggcttctgctaacagttatttttctgctcattttcctggaatggacttaaaccattagctgtacacctacagcttaaaacccatccataaaaaccaagcgtagtggcacatgacaacagtcctagccctgggaaggctgaggcaggaggatctctgtggattccagttgagggtgatctgcatagtgagttttagggggacacctaatgaggggccacctgacccaaacaaacagaggaaaataacccaacaaaccaaacacaaacaacgtcattttggactagttacaaagtcccattccgatatttcttaaattgctgctgggtgggatagaatcccagcctagaatcccaggccacggcagcagggacactgtggttaaggccggcgggagctacagagtgagacccagtcccccaaataagttagttaatggttttgtgttgggctgtattggtagccatccaggggagcatgctgtccacagactgcagattaggcgcatctatcggccacgtccaggcctctggtcctgctcgtctgtgcccatgctaggtataagcatcttcaactggtttagtgatctcagaaagaatgtttcaaaaggaaagcacggttctctagtttatcctttgtctcacttactgttctctcactgcgagaaaacacccatgatcggaacaacttatgaaaggaagaatttaactgagggcttgcttccagtttcagaagtttagtctatgatgttgggaagcctgggcagccggtaggtatggtgctagagctggagctagaggtggagctgagagctcccatctgatctgcagagagatgggggtggggtggaggggctgaatatagtgagggtttttgaacccttctacacctcctccagcaaggccacaccttctaatcttactgtacggttgcactaactggggagcaagcattcaaacacatgatccagtgggggccatcctcattcaaaccaccacagtccttccagttacagagatggtttccatagtgtgtttatgagatcagtaacagttgtgctttattacaggcagtttgctaagtgtctagagcttaatgaatgttaggcaagtgctctaccactgagctctctctccagcccctctgcactcgcgcgcgtgcgtgcgtgcgtgcgtgcgtgcgtgtgtgtgtgtgtgtgtgtgtgtgtgtgtgtgtgtgtgtgtgtgtctttacgattacttgccacaattgttctgtatatataactctaaattctgggctggaaagatggctcagcagttaagaacacttactctctttgcgtaggctctgagctggttctcagcacctacactgggtggcttacaccacctgtaactctagcaccggggatccaataccttgttctagcgtgtatttacaagcacatacccacacacaggcacacatacctatgattaaaaataataacaataataaaaaccctcaaatcctaccttttaaaaatattttcactttgtaaatattttcacattctttataaacttcacatttattagcaataggcttctcttataagtacagattcccaggttaactgttatcaggcactggaagatgttttgtttttacaaaacagcactgtgctggacatctttgtgtctaaagttcttccatgtttatatcattgtcttagtcactattctattgccatgaagacaccatgaccaccacctttaattggaggcggggagcatggcagcagacatggcaggcatggagaagaggctgagagctacattctcatccttaggcagagacagagagaaacagtgggactggcatgggcttttaaaacctcaagtcccaccccctcagtgacacacttcctccaacaaggccacacctctaaatccttctaatcctttcaaatagaaccattccctggtgactaagcattcaaatctatgagtctatgggggccattcttattcagaccaccacagtcatttctagggtctgttcccagaacatgagttcctgggtctgaatgcttttcagtccacggtgtagcagcctgccctcaatcctcttacagggagaattccactcagtgactgagcgcactccccttcgcaataactgggctgtcttcctgcagccaaataacattccgcagattgtttacgttgcttggataacaggccaagagccaacggcagatccagagccagctatcaatcatttatcataacaagaacaaggaatagtctgctggtttcaagccccaaaaatgcccaactcttgtttatgacattggctttccctcccccaccctagcacttccttaggtaatggcagctgatgggattagggggggagggtcaccttattctcactttggaatcagtacatagcaagtcagccatagagaaggaagtcaaagggaagagaggaggccctggttcagcacaccttgccaagggccccttgggaaggagcccccgtcatacctttgcagatctgtatctgtggctcagctttcttccagctgtcaggtgactctctcatggttattgagcctggccccgggcccagacatcgcacggaggaggctgtgatgagggcgatgcctatctcttccggcttaccactgactttcctgtcagatgagtcaacacgtgcccagtggtgcccctgtcagagggtgcagtctctccctgctggggtggggtgggtggaggtgtctggagactgaggtactgaatatagagggctggatagagtgctactagggaccacacagcctgttctctgctctccattgcaggctgtgagagtgatctgctcctgacagcctttgttggacggagttccatattccttccccactgaaagaatactctcctctttttaaaaaatatttacttatttaatgtatatgagtatgctgtagctgtcttcagacacaccagaagaggacatcagatcccattacaaatggttgggagccaccatgtggatgctgggaattgatgctgggaattgaactcaggacctctagaagagcagtcagtgttcttaacagctgagccatctctgccacctacctcctttttcttttttcttttttttttggtttttcgagacagggtttctctgtgtagccctggctgtcctggaactcactctgtagaccaggctggccttgaactcagaaatccgcctgcctctgcttcccaaatgctgggactaaaggcgtgcaccaccacgcccagcttttttttttttttttttaaacgtgaatggatagagacctgataatgtgagcccaacagacagcctctggccctgggcagattgaggatgtgtcaggtgacttttgaagtgcataaaggaacacttcagatttctctccctttgtaagttagatatggtcttgaggtagttttgaaactcaccagctcttcagggtgttgtgggacctctggggatgatgtgggagccagatagtcggcatttctgtaagccaaacctagacacacctaaccaactgaggcaggcggctgctgctgctgctgcagatagggtttctcaccatgcctttggcctgggaggagtctaaggcctgtttgtttgtttctctgtgtttgtataaagactcaagcagaaatggaagtcagaggctgagaaggaaagcaagacgacctctcctccacccccaccgtattccttgggcccactgaagccgaccttccttctggttcctctcctcaccccacacagctctgggtctgacaataccgtaaaccacagctgcctgggtgtcagggacgcacagagcccttatgacaacagcaacagagactacttattccccagataatcatctggatggtacctggcagctggcagggcaccacgagatcagcacacaagtttctcatgcgggtcccatccacctggggtggggtggggcgggcggggctgcagcttcactaacccacaagagctctgcacaggttctgagtaggtgcagctggtgctgcataggctctgaaggaaggaaggggctgtgaggaacacaggccattgtgaagacagcttgtgatgactgaatagagatgcccgtcagctccacatctgatagtggctcacaagctgcaccctcaggaggcctcagaaaggggctccaaaggctgccccagctgcctcgctctgcctcactgccccaagccaccttttagctctcgaactcctaaagtccaagcactttgccattctctttccgaggccactgaggccgggtggaagcttggttccgatttccttctcaacatctggaaagcagctgggcccggtggtggtgactaatatctcagggcctgatggtttacgcgagtgacaatttctcacaagcagtttttaaatgtgaatgatgaccccaggcactgctggctgcggaggcttcattttcctcttcgatctcaggacttcaggcgaaaagcggagtggaagtagagagcggatgggtgtccaccgtcctcatggtacttgcgggaggtacagcctggaaaacacgtttcctgtccccctactctcccaggagagggatgatggtagggggtgcctcttccagggcggagagaactactttaccccagccttgcccattctgatttcaactggactggagctactaggaaagtcgacattcatgcaaaaagaaaaaacgttaactagcaagaatgcactttcattttggtttttagagaactgttgcctgtttctctcaagagtctggaagaggccgctcactgcacactactgtatgaaccctcactgcccaccctggaggaccaagtgcagtaacggtagcccaaacaccaagtcaagtgaaaatcgagggaaaaaaaaaacaaacaagcaacaaaaaaaaaaaaccaaaactaaactaaaaaacaaatcacccccccaaaaaaaaacaaaaccaaaaaccaaaaaaaacaaaaaaacaaaacaacaacaacaaaaaaaacccaaaccaacccgctgtttcctataacagaaaagcctttggtttcattttttattttgatttttttgtcttaaaaagtataaaaatagcctgtccatgctctgcttcagggaatgagcctgtgaacactcccaggcgcaggcaggaagggtgtctgcttcctgctacacctcactgccaccttggccttccttgctttacgtttgactgagtggcctcagatgctttcccctggggctttgaggaatccagtgatgttagtggtcaccgaggagaccacagagccacagtgtggtgcttagattaaagtgacttctgcaaccacagcaccccacacctgccgtcttactgaactatgccagtaacttgccttttctgccaccaccacgagacgagacgggcagagctcggaagctgtcaccccatgccctctgcttgtccgctctaggggccactgacctaagcattagttattttattttattttatttttttgtgggttttgtacattttaggtcctgttgctgtcttagaaaaggctctgtaggttgacagaaaatcaggccaagtattcatgttttgttttttttttttttccttctttcctcctttgctaagtttttgggactcaagggtagcaaaactgctgtgaaagggaaatttattaaaaatgttacagatcgtgatcttcaggggatcggcgactgtgctcactcacagttcttcagtccctcacagggctctgctgttacccaagccaggcagagcaggcagacggaagactgaaatccagatagctcattatctctgtgagttaaatggctttgatctccaagttgttttcactattgttgtaaggggatagcctccccccaacccgtatcaaaaggatgctttttccttttgactttttataagctaagtcaacaaagtctgtttcgtccggtttcgttcacttcacacaggtgtatgccctcagctgcttctggtctcaattctgtgcaagctgaataggtgttccatcctcgggtcattcttactggagtttctgcagcccacaggctgccttgtcaacagtaccacttaacaccagcattcagcgaccaggcagccaaatgcctggtctagacagagatgatttaaacatgatctttgttgcatggtagaaagagggaacacatactggttctagttctaaggttcttagatgtttggtccttctggcattagtgaaatagctttaaactatttcaagggagaagccttggccacacccacgacatttggccgacagtcctttctctccatgagccttgccttcccacctggctgaaagctcacactgaatctttcctgtgtccttggtgtcttgggagaaagggaaccccggtgtgggctttactgccggcattggcttggagccagcgtggagcagagcccaacagggtgggccaggcttagttatggtgtgccggtttaaggaatgcctggtttgcctggttgcnnnnnnnnnnnnnnnnnnnnnnnnnnnnnnnnnnnnnnnnnnnnnnnnnnnnnnnnnnnnnnnnnnnnnnnnnnnnnnnnnnnnnnnnnnnnnnnnnnnnnnnnnnnnnnnnnnnnnnnnnnnnnnnnnnnnnnnnnnnnnnnnnnnnnnnnnnnnnnnnnnnnnnnnnnnnnnnnnnnnnnnnnnnnnnnnnnnnnnnnnnnnnnnnnnnnnnnnnnnnnnnnnnnnnnnnnnnnnnnnnnnnnnnnnnnnnnnnnnnnnnnnnnnnnnnnnnnnnnnnnnnnnnnnnnnnnnnnnnnnnnnnnnnnnnnnnnnnnnnnnnnnnnnnnnnnnnnnnnnnnnnnnnnnnnnnnnnnnnnnnnnnnnnnnnnnnnnnnnnnnnnnnnnnnnnnagggtctgccaaagtgggagggggcaggccagctggggagggtctgccaaaatgggagggggcaggccagctggggagggtctgccaaagtgggagggacaggcgctggggagggtctgccaaagtgggagggggcaggccagctggggagggtctgccaaagtgggagggggcaggccagctggggagggtcctggggctggcgctggggagggtctgccaaaggtctctccagcctctgctgctagtgtagttgggtgccagttccaggaagtttctatggcaaccttaatgcgccttaaggaacactgtcaggtttgtgaacatatgctcagatggagatcttgtttccagggaaaggactggtacagtgtgtagcaagctggaatggacagagagactttggcaagagatcatatccgttaaaaacaggatacctcaatgctacatgtttttatctttgagacaatatttttaaggtttttacgctctgtcccctgtgagctgatacctaagacctaagtcagtgcttttttaatgcctttttgccctcttgtttgctttaaagtgaaatttgtaactgtttggaataaataatttctaaagttgcacgtgagatgttcttctgctttgggaacctggtcattaaaaggaaaaccttccttccatgatgagcgaggagtaaagaatgaggaaggctaactaactaattaaataggactgtctctgagggcacagcggctcagtcctctaacccggctcgacactaggaaggcagaggcgggaggatttctccaagtttgaggctagtgaggccttgtatgtcacttatactgccctcacagacagacagacaggcagacacacacacacacacacacacacacacacacacacacactaaacctgggactagcaatttctcaaaaggttttagttagtaaacattctccccaaaccaaggcctgggatttctggaaggaaatcagaggctcatgtgtctgtcacgtttgcattgttcagcattaccagatagaggcatgttagaaaagtgaaggaaggcccactacttaggtgtgtactggactatggaggtgagaatgggatcctgagagccatcccgagctttcttggtcatcagatggctgagtctgtcctccactgaaaaagatcttgggcaagaaaaacttgggacccagccttctctatgtcccaaacagaaggaaacccatcatgtggatgctttgcaggtaagagtaggggtggctgctgagggccagcctcagcttggtttgggttctgagagaaggggtgtctgggagca

SEQ ID NO: 1235 - DNA, 1166 bp, Mus musculus
agcatgctgaccgtcggctgcacgctgttggtcgccctgctggccgcgcccgcggtcgcgctggtcctcgggagctgccgcgcgctggaggtggcaaatggcacagtgacaagcctgccaggggccaccgttaccctgatttgccccgggaaggaagcagcaggcaatgttaccattcactgggtgtactctggctcacaaaacagagaatggactaccacaggaaacacactggttctgagggacgtgcagctcagcgacactggggactatttatgctccctgaatgatcacctggtggggactgtgcccttgctggtggatgttcccccagaggagcccaagctctcctgcttccggaagaacccccttgtcaacgccatctgtgagtggcgtccgagcagcaccccctctccaaccacgaaggctgtgctgtttgcaaagaaaatcaacaccaccaacgggaagagtgacttccaggtgccctgtcagtattctcagcagctgaaaagcttctcctgccaggtggagatcctggagggtgacaaagtataccacatagtgtcactgtgcgttgcaaacagtgtgggaagcaagtccagccacaacgaagcgtttcacagcttaaaaatggtgcagccggatccacctgccaaccttgtggtatcagccatacctggaaggccgcgctggctcaaagtcagctggcagcaccctgagacctgggacccgagttactacttgctgcagttccagcttcgataccgacctgtatggtcaaaggagttcacggtgttgctgctcccggtggcccagtaccaatgcgtcatccatgatgccttgcgaggagtgaagcacgtggtccaggtccgtgggaaggaggagcttgaccttggccagtggagcgaatggtccccagaggtcacgggcactccttggatagcagagcccaggaccaccccggcaggaatcctctggaaccccacacaggtctctgttgaagactctgccaaccacgaggatcagtacgaaagttctacagaagcaacgagtgtcctcgccccagtgcaagaatcctcgtccatgtccctgcccacattcctggtagctggaggaagcttggcgtttgggttgcttctctgtgtcttcatcatcctgaggtgaga

SEQ ID NO: 1236 - protein, 387 aa, Mus musculus
SMLTVGCTLLVALLAAPAVALVLGSCRALEVANGTVTSLPGATVTLICPGKEAAGNVTIHWVYSGSQNREWTTTGNTLVLRDVQLSDTGDYLCSLNDHLVGTVPLLVDVPPEEPKLSCFRKNPLVNAICEWRPSSTPSPTTKAVLFAKKINTTNGKSDFQVPCQYSQQLKSFSCQVEILEGDKVYHIVSLCVANSVGSKSSHNEAFHSLKMVQPDPPANLVVSAIPGRPRWLKVSWQHPETWDPSYYLLQFQLRYRPVWSKEFTVLLLPVAQYQCVIHDALRGVKHVVQVRGKEELDLGQWSEWSPEVTGTPWIAEPRTTPAGILWNPTQVSVEDSANHEDQYESSTEATSVLAPVQESSSMSLPTFLVAGGSLAFGLLLCVFIILR

SEQ ID NO: 1237 - DNA, 81968 bp, Homo sapiens
  misc_feature (1)...(81968): n = A,T,C or G
nnnnnnnnnnnnnnnnnnnnnnnnnnnnnnnnnnnnnnnnnnnnnnnnnnnnnnnnnnnnnnnnnnnnnnnnnnnnnnnnnnnnnnnnnnnnnnnnnnnnnnnnnnnnnnnnnnnnnnnnnnnnnnnnnnnnnnnnnnnnnnnnnnnnnnnnnnnnnnnnnnnnnnnnnnnnnnnnnnnnnnnnnnnnnnnnnnnnnnnnnnnnnnnnnnnnnnnnnnnnnnnnnnnnnnnnnnnnnnnnnnnnnnnnnnnnnnnnnnnnnnnnnnnnnnnnnnnnnnnnnnnnnnnnnnnnnnnnnnnnnnnnnnnnnnnnnnnnnnnnnnnnnnnnnnnnnnnnnnnnnnnnnnnnnnnnnnnnnnnnnnnnnnnnnnnnnnnnnnnnnnnnnnnnnnnnnnnnnnnnnnnnnnnnnnnnnnnnnnnnnnnnnnnnnnnnnnnnnnnnnnnnnnnnnnnnnnnnnnnnnnnnnnnnnnnnnnnnnnnnnnnnnnnnnnnnnnnnnnnnnnnnnnnnnnnnnnnnnnnnnnnnnnnnnnnnnnnnnnnnnnnnnnnnnnnnnnnnnnnnnnnnnnnnnnnnnnnnnnnnnnnnnnnnnnnnnnnnnnnnnnnnnnnnnnnnnnnnnnnnnnnnnnnnnnnnnnnnnnnnnnnnnnnnnnnnnnnnaaaaatacggccttcattcttacttccacatttattaaataagaccttgaataaagtcatgaatataactttttattcataaaacaattatttattgagtgcctactctgtgcctagtattgttttatgcactgaagataaagcaatggctagacagacacagtgcccatgggaatgtgtagaaggattttaagcagaaaaataacatgatctaatttacatgtttttaaagcatcctggctgaaatggggagaatagattgaagtggaaatacttaatgggagaaatcagtggttcatactttagaagtctgagagagatggtagttaacttggacatgtatggtagcagtgaatgtggagagaggcagatggatttgaaatctcttctcgaggttgaagcaacattgtaagaactggatgacagaggagaggaagaaggagttaaggatgattcttaggtttctgacatgagcaaatggtgggacaagtcccttagatagagaatataaggggagagcaagtagtgacaggaagatgaggctcgggtttggatatgttgagtttgagatgtgtatgagatctccaactgcagatgtcaggcaggtagtggtagcacagggaaagttgcttcttaagatgggagagactatagcatgttaaatgctgattggtaggattcactggagagggagaggtttaacacaggagaagagagggataactcacggcttaaggttctagagaagaggggtaggagtaatccttggagatattagcattagatgagaagggcaaaatctgtgccttatttatctttgaatttgttgtagtggggagaggggcaaaaaaagtctggcacatggctgtcattaatgaataattatcaggctggatgcagtggctcacgtctgtaatcacagcactttgggaggccgaggagtgtgaatcacctgaggtcaggagtttgaggccagcctggccaacatggtgaaaccccatctctactaaacatacaaaaattaaattagcttgcccacgaacacttgttattatatgactttttgattatagcaagttcaaatactttatttatttgagatggaatcttgctctgtcacccaggctggagtgcggtggcatgatcttggctcactgcaaccttggcctcctgggttcaagagattctcatgcctcagcctccagagtagctgggattacagacatgcaccaccacgccccactaatttttgtatttgtatatatttttttggagatggagtctcactctgtggcccagattggagtgtagtggcggtgggggatctcagctcactgcaacccccacctcccaagttcaagtgattctcctgcctcagcttcccaagtagctgagattacaggtgtgcaccaccacatccggccaatttttgtattttgtattcaccatgttggccaggctggtcttgaactcctgacctcaagtgacctgctcacctcagcctcccaaagtgctaggattacaggtgtgagacaccgcgcccgacctaatttttgtaattttagtagcaatgaggtttttccctgttggccaggctgctctcaaactcctgccctcaggtgatccgcttgccttggcctctcaaagttttgggattacaggcgtgagccaccgcgcccagccttatttttattttgttttttacctttcctatggtgctgaaaaaacttttaatctttatgctgtattgcttcaaatttattaaaattatggtcagcctaatccattttatgggccagaaaattgtacagcatgtttagaaaaaaagatttatgtaatggttaatataaataaggttttttccttggagggaaatttcacttaacagaaaaaaatcgattctaactaatatccaccttcttcctcttctccctggaatggatgaggttaccatatgtacagattattgtcattatcaggctgagcatttactgggtgccaggattgtattaagtactgtaggtagttttctcagttaatcctcacaataaccctgtgcagtagacactcttaatattcccattttatagaaaaggacagtgaagtttagataaaattacagcatccaaggtcccagctggtcaatggcagagctagatttgaactcaggcagtttggctcaggaatctgcttacatgtctgtgtctacataaatagctcggcatagacaaatgattgctaaagagcatgctaataatgaatgcaaatggaacacatgattggcaagtgaagggtaattattactcaaccctcattctgcacaaatccacagcataatgcagcctctgctgggaagtgtaagagcaaatagctcacgcatatgtgtgaagtccaagtttagactatcttccaggaaaggtacaatggcaggcagaggtagtaactgcagggccctagctctgacaagagattactgttaacagcagaagcaaacccgactgaaactgttaagtcagctagtacagtaagtcctcacttaaccttgttaacaggttctcgaaaactgtgactttaagcaaaacaacgtataatgaaaccaattttaccataggccaattgatatgaactagagttaagtttctacgacatttctggtcacaaagatgtaaccaaacttctaaataaagaccccaaacactgctaatatcaaacattgaaataaatgtgagctatatatacatttaagaaagattaataaaagcaatgaagaaaattatgtacccatttatttcagtttagtgtctctgttgtgggtggcggagcctggaacctatcacagcaacttggtgcaaggcaagaaacagccccagacaggacgctatcccatcacagggtacacactatcccatcacagggtacacacacacacacacacacacacacactctctctctctctcgctctctctctctatgtctctctcagactgggacagtttagacatgctaattaacataacgggcacatcccagagtaccagaagaaaacccacacagatatgggggaagcatgcaaactccacacagacaggggcccaggctgggaatctatttttttttccttattaaaattatcacttagcctggtgtggtggtgtgcacctgtagtcccagctactcgggaggctaaggcaggagaatcgcttgaatccagaaggcagaggttgcagtgagccaagatggcgccactgcaccagcctgggcggcaacagagcaagacgtcatctcaaaaaaaaaaaaannnnnnnnnnnnnnnnnnnnnnnnnnnnnnnnnnnnnnnnnnnnnnnnnnnnnnnnnnnnnnnnnnnnnnnnnnnnnnnnnnnnnnnnnnnnnnnnnnnnnnnnnnnnnnnnnnnnnnnnnnnnnnnnnnnnnnnnnnnnnnnnnnnnnnnnnnnnnnnnnnnnnnnnnnnnnnnnnnnnnnnnnnnnnnnnnnnnnnnnnnnnnnnnnnnnnnnnnnnnnnnnnnnnnnnnnnnnnnnnnnnnnnnnnnnnnnnnnnnnnnnnnnnnnnnnnnnnnnnnnnnnnnnnnnnnnnnnnnnnnnnnnnnnnnnnnnnnnnnnnnnnnnnnnnnnnnnnnnnnnnnnnnnnnnnnnnnnnnnnnnnnnnnnnnnnnnnnnnnnnnnnnnnnnnnnnnnnnnnnnnnnnnnnnnnnnnnnnnntatatatataatttcaaaacattgacctaaacgatgtcatcagaagacctgctaccaatggccttccattttaaatccatgcagcttctgagaaggggcctcacagagcagctaatgaccaaattctacttcaacatcttcattttatgggtgatataatgaattatattttaaaaaacatttggatgaacttctgtgtctagaaagaatacgttttgggaaagtttacttatttacatttatttaacaaaccctcatatagagtttatcatgtattgtcattgttataaatgttttacatatgttaactaatttaattcccattagaattctatgagggtacttcccccctattttttagatgacgacattgagacacagagaagttgagtgacttgttcagagacaaacagctgataagtggcagagctaagatttgaacccagacactttggctccagagtttgtgttcatagaattatattgtatagtgcaccaaaaaaagtgcactatctttaaggaatctcgttatatatcctttaaaaatatgagttatcttcccttccccaccaactcaataatgcaatctgttttctggatttccaagcatctagcttgtttaattttataattgcgatgctttattaaaaatgtggtaaaatatacaaaacatgaaatttcccattttagctttttatttatttatttaagataaggaaggtctttttctgtcccccaggctggagtacagtggcgccgtcatagcttgctgcatcctcaaactccttgcctcaagctatctttccaagtagctgggactacagatgtgggtcaccatgtccggctaatttttaaattttttgtagagatagggtcttgctatgttgaccaggctagccttgaacgcctggcctcaagcaatccccctcatttgggcattttaaccattttttaaatggttcagtggcattaagcacatgcacattattgtgaaactataaccactatccatctccagaactcttttcatcttgcaaaaacggaagttctgtacccattaaacaataacttcccgctctcctcctactaacccctggcagctaccactctgcttcctatctctattaatttgactactctaggtacctcatataaatgaaatcatataatatttgtccttttgtgtctggtttatttcacttagcataatgtcttcaaggtttatcatgttgtagcatatgtcagaatttccttcctttttaagactgagtaatatttcattatatgtacataccacatttttttatccattcatctcttgatggacttttgaattgtttctactttttggctattgtaaataatgctgctaaaaatacgggtgtacaaatatctgtttgagtccctgctttcaatttttttgtgaatatatccagaagtggaactgccggattatatgacaattctacatttaattttaattgtgatgctatttatttatttatttatttatttatttatttatttattgagacagagtcttgctgtgttgcccaggctggagtgcagtggcacaatcttggctcactgtaacctccgcctcctgggttcaagagattcttgtgcctcagcctcccaagtagctgggattacaggaatgcgccaccaggccaggctaatttttgtatttttagtaaagatggggtttcaccatgatggccaggctgatctcaaactcctgacctcagatgatctgcccgccttggcctcccaaagtgttgggattacaggtgtgaggcattgtgcctggccctatttttatttttatttttaaagacggggtcttgctcggtggcccaggctggagtgccaaaggtgtaatcataggtcactgcagccttgacctcctgggctcatgcagttctcctgcctcaatctcccaagcagctgagactacaggcatgtgccactatgcccagctataactgtgatgctttttagcagttaaaaatcataacattctctaaatattacaagaaggggataaacttttatgaaccctttctgagaatggtgctaaacaaatcccttttctgggtgtaaactcacctggtgaggcaatggggagccagactgtcatgctgccggagccagggatgctgcattcctccactgtgaaagcgagggtctccacaggcaggctgaggccctcagtgggccctggctggggcctgactctgagggatgccactggccagacactgagttctgttattagacctctgtctgcccacgtaacctcctcccaggctgatgagaaagcaggaggggaaggtttcagagaataagaagcaccttcctgtaattattgattaaccaggggctggctccagggccagaggccagggaggggtctgcaggtcagttcagccctaccccactgcacttctcagaataatcgttgtccctaaagatggattcacatggtgaatagagaataaagtgcatagttttaaactctcacagttgagaatggccccaacacatcagcccagacctggaggttgggggcagggtgggaatttaaaaagaccactttgagtcagggtatctgggatcttgaccagctctgtcaccactgcctgtgccatctttaccaagcaacttctcttcttgaggcctagctccttatctaaaaagtgagggaggagaagcaatgatgaccaagtcccttttggtttcaaaataaccttacatatttattctgtgggtctcctgtagacttctgctttaggcaaactttaagatgcttcatcgcttcaggtgaaaggtgagagaggacttgcttgctgggagtcagcctagggcttccccctttacaggagacggagggtccctgcaggaacaccggtgaaggagagggtgtcccacacaccaggttctgctctctgctctcccctcacagactacagaacaccaagtgcctgctgccatggtctgcagtgtctttggtcctgggtgggccgaccgagcccttgctcagtgagagtcctgggccaggagccagacctcaccctggagctgccagttactagtagtgcagttttgaacaagccactttacctctgttagcctcagtctactcatctgaaaattgggggcaatgtctcccagcattcagggttgagaatttcagaggagattgtgtatgtgaagcaatttgtaagcagcacagttatctgagaagtgttctggctcagacaactaaagtcttcattgttccttctgttgtctgggtgagggcaggtcaggctgaattgtgcaggtatgctttcttctctttcttttttctttttcttttcttttttttgagagggagtttcgttcttcttgcccaggctggagtgcagtggtgccatctcggttcactgcaacctccgcctcctgggttcaagtgattctcctgcctcagcctcctgagtagctgggactaccggtacgcaccaccatgcccggctaatttttgtatttttagtagagatgtggttttaccatgttggtcaggctggtctcgaactcctgacctcatgatctgcccaccttggcctcccaaagtgctggaattacaggtgtgaggcaccacgtccggcctggccaggattaaattttttcatgtgaaccacaacactaaaactttgtatattgctgcgcttatcttacaaatcaggaaataggggttcagagaagttaaatagcttgcttaagtcacacagccagcaagtggtaaagctgggatctgcatgactacagagcacacaggctccccaccagtagattagagagggggaggtctgctttggtgcagagacaggtgggatctgtgatgcccgttcttggtttcaacattcttttaaactctcctatctgagcctaggactttctgcagccttcctgttttaggctggcagctcacagtccctctctggttattttcaggtctgtgtgtgccacagagaggaagggggcaaccacagtgggaaccgctttccagccctgctgcaaccccttttgaaatagcaggcgagagggctggtggcctccactgtgctcttctgttcctgtctgtgggcatggctaaagcaaacaagctcacccacaccagctcccatcgtgcggtggatcagtgcatgtgcttggttctgtctggcactgctgatgggtggttcctacagaaagatccagatgcacggggtctgaggactgtttcagaagctctgtccgtccatgcttggccctgtccacttgggagttccattaggccatgcctgttccagctgtcccaggatctttgatctgggttaggattggcctgaaaccaaaggtagaaaaacacattctaatgagcagttgctggtctagaagcttctcagcctaaactttatttcagcatttttctttccctccagattcagctatgaggccatcctatcagctttaggctctgtgggggtccttgagagagttcccctccaagggacggacagatggtccccttcaaggtccttgtggttgctcaaaagccaggtgcttgtttctttctttttttctctccttcctttccttccttcccctctatccctccttccctccctccctccctcctcccttccttttctttctttcttttcttttttttttttctttccagacagggtctcactgtcatccaggctggagtagcagcccccaatcacggctcactgtaccctggatctcccggactcaagcaattttcccacctcagcttccctagtagctgggactataggtgtgtaccaccacacccagctaatttttaaatttttttatagaaatgggggtctcactttgttacacaggctggtctagaattcctggactgaagcaatccacccacccggctctcccaaagtgttggggttacaggcgtgagccactgcccctggtgttagtgtctgtctgtcaagtcaggagggcagccatgaacgttctgatgtctactgagcacgtgtggcccagaccgtgtgtcaggtgtttaggtgccatccacagaaccttcctaataaccctgggcagcataggctttcttatctctgacagatgaggaaatggagactcagattctgaaccgaagtcacagacacagtagatggtaggtctaaatggggacccaggtctatctgactgcaaagtccaaaccgtttccttgcctctgctgcagcctgcgaggagcagctgggcagaaagactgtgcctttacggtggtgagtcttccgatgcccaagcctcaccccagaccgatgaaatcagaatctctggagacccgacccagacattggtgggttttagggctcctggctgattccagtgggcaaccgggctaccaagcactgttttaccctaagggtaagaggaacatcgcctcctcgagggctctccaggtgtgcctttcacagcgtaatcccgttcacgaaaccaaaaatcaaaactaggccactgcccactggtggctgatacgcccttttctcatcaacagaaccgggaggaagggctctggtggggctggcggtcccctgttctccccgctcaggtgcggcgctgtggcaggaagccaccccctcggtcggccggtgcgcggggctgttgcgccatccgctccggctttcgtaaccgcaccctgggacggcccagagacgctccagcgcgagttcctcaaatgttttcctgcgttgccaggaccgtccgccgctctgagtcatgtgcgagtgggaagtcgcactgacactgagccggaccagagggagaggagccgagcgcggcgcggggccgagggactcgcagtgtgtgtagagagccgggctcctgcggatgggggctgcccccggggcctgagcccgcctgcccgcccaccgccccgccccgcccctgccacccctgccgcccggttcccattagcctgtccgcctctgcgggaccatggagtggtagccgaggaggaagcatgctggccgtcggctgcgcgctgctggctgccctgctggccgcgccgggagcggcgctggccccaaggcgctgccctgcgcagggtaagggcttcgggcgcacctggagggctggggcagctagcggctgggggaaaccgccttggtcaccgcagtctgtgggaggctggagggaggaaaggaggtgcgacggatccccttttctgtggctgccttgaggccccgcgggtacctagctgtgtggtcgcgggtagtggctcttgcgccccctgctgcgcttgctcccttggtccggagcgctccccggaatgcccggtgaagctgtgcgggaaccctgcggtctgtgtacaggactgtgtccttgcaaacctgactctcgagcttccttcccagtgcccccaggagcctttacacaaccgcgtcccaggttactctaaggggagactgcccgagagggcgcgccccagcggggtgatgtacccgcctggggagtcctttgtaccagcgcccctcttctccctctgcattgggggtccacctcgcctggtcctccccccacccccgcgggtgcatgtgtggatgacagtgccctgactatgaagggactgacatcacgggcgctgagtcacggatcttcccgctgcacggagtcactttggcagccaccaactctgggaagccaagtgccccagtcctgggaattgagtcgggaggctggcaagggagtgagacctcctggggctggcacgtgctggactcccctctagaaaagagaaggacccgtgagggagagggcagaggcacttactgctcccgttgactgtaatctgcccctggcaaaccaggcttttcttgggctctggccgcatgcccagctgcgtgtctagtctctcttctggaagagttgggcaactggctctccagaggtttattttagggtcccagtgcttctttgaggacacagcagaaaactaaggggcagctgacaggcttctggaacagctgacaggctggggaggctgaaggctaagactttcaaccactagatcacactgaattccagtcctaggtgaacactgatctctccctttgaggaggtgactttctgcaactagaggctgagctggagtgtctgaggctctctttgctttttggatggttgtggtccttatgattggaagaaaaaaagaagggattccattttcaatacacatttataactcctgccagtaacagacactgttgattggggcacccattcaatgttttctaatcctccactgtatctacatataactttgtttgaaagaggagactgaggttcagggaggttgggatggcgggatggcaggttgtcaggccccggtgatggaggccaacccctcccgtggctctgtgctccagtgtggtagatgtctaagactctcaaatatagaactagatcagcaggcagagctgggggcattggggcaagctgagagtcactcttgtctggctgagtgctgggacagaaaaggctgagggagggaagtggaggcccaggcttgcccatggtggtgttagagggatgcaagacaggttccagggctcggatggcctcaggagcaagcagggctcccttggctgcctctgctgctgtcacgccagcccaaggctcctgccccagggaggttactgttactgctgtagttgccaccacctgttgctcctgagtggatgctaggcccttccagggcagccagttacagtcagttttccatttccctggtgctcaggaaggattaggagaggtggtctcatggcctgaacagcccatgaaaggcagaactgagagactggggaggaagtgaaagtcctcccagctcagaaggaaaatgcagagaagtagaaatacccagcccctctcccacacccacacagactcagcccacaaactggagagtaaaaataaagaaatcgtacaggaagcatggagcaaatgactgtgagatgtttcgctttagagaagtgaggagcagagggggagcagaggctggagttggctgagaggggaaatccgcaggtacagcctgcggggctcttagagcccagaggtttgttttcctcgggatcagctgccgcccacacaccctggagctgccaggacttctcaggtgtactcgttgtctaagggcctggactagctgggacttaggcttctgccggttccaacactctggtgctggaaggctggacttgggtgactcaagttccctcttcctactgcaatgcaagaaaatacacaaaagaagtatgtatacctttaagtatctcaaagagctatctcagcttctgaatttccttctagggcacctcttcctgcccccattacccacacacgtgcctagcctcaccctaaatcagtatttctcaaaagcttagttctgagcctagcatcagatctggtgtgtgtgctgggtgggagggctttggtaaacatgatgatttttgaaccctaacccagatttattaaataagaacacctaggagtgaggcctggggcatgtccttttaaacaaactgccccttgtgattcttaggcactgtcaggtttgaggacggctgcctaaatggtgtcattgaggaactgaatgaaggccctcccgcttcgggctctctgttgccagaaatctctccttgctttggcttgctgcttgtttattcattgcagcaaacatttcttgagtcggtgtagagcctgtgaggcctgtgtaggatcagctatgcagactccaccctaaaaggagcctgaaaatggtcatgggtaaatcctgagaagggctgagaaaccccagactctgaccgggccactgggtaccaactacccgtgaacagattgtctggcttggggtagggggtggttagagagaggaagttcctctgactgaggaccaagatcccaaggcagcaggcacactgatcctgaccctgaccctcatctccagccctcagcagccagggtaaacaaatactcccctcactgggtatttgtagattacacaaagtaacctaggtgctgactgctgaaaatatacactcccttcccccgtctcctgaatcctggtcccaccaggcctggaagccacagacccagcaagcaaaagagtttccagtcaatgaatctagtctggattgaagctgtgctctgtaatacggtagccactagccacgtgtacctatttaaatttaaattatgccagcgcagtgactcacgcctgtaatcccagtactttgggaggctgaggcaggaggatctcttgagctcaggagttggagaccagcctgggcaacagggtgagatgccgtctctacaaaaagatttaaaaaattagctgggcacagtgacatgagcctgtagtccctgctactgagaaggctgaggtgggagaatcacttgagtccagtctgcatggagccatgtttgcactaccgaattccagtctgggcgacaggagaccctgtctccaaaaaattaatttaaatgaaatcaaataaaaacttagtttcttagttgcactagtcacattttaagtgctcaacactcacattgctagtggctactgtactgaacagtgcagatacagatctcttccatcatcgtggaaagccctactggacggtgctgggctagagtgttaaccagtttcttccagaggttttctgttctcttttcctttatccccctctgccttctgctctcctccacctgaacacagctcattttgcataggtgatggctaaggtcttcaagccaggcacatctctgccctgcactgccaagtaaaaatgataacaccttgggcaagtgatttaacttctttgacagccagtgttctagaaaatagaaataattgtattacctcgaagggtggttatgaagatgagatgagctaagtaaggtatgaaatagagtgtttacagaagtccctaacacacagcaagtgcttaaataagtgtaggtgatcattcattcactccaaaaatatatttttggagtgaacacctcctactctgttccaggcactattctaagagctggagatacaccatgaataaaagagacaaaaaccccaggcttagttgagtttcattctagtgtgggagactattaacaggatgtaaattaagtatgtggtatgctagcgactagtgctaaggagaaaaactaaagccgagagggagacagaccccatgtgtgtttgtggcagggtggggtggcatggtgccttggatgggaggccagggaatgccttgctgagaacataatatttgagtgaagacctgaagaaaatatacaaatctctagagattccctatatgtccatcttgggcaggaaaattcttgcctcctctttaacaatgtgtactacctgagggtgtgttatgttctggagcagagggctctgtggggacacatggatgctccctgccctggagaagtatctctggggtaacaagtcctcagccctttagctccttgaagtctagcagagggaagtgctaaatgccaggtcataactgcaagtctgcaggtgggatccttgagggctggagtggcaaggggaaggtgacaaagaaaaggccttttttttttttttaaatacaggatcttactcccgtagcccaggttggagtgcagtggcacaatcactgctcactgcagcctcgacttcctggtctcaggtgatcctcccacctcagcttccggaatagctgggactacaggcgtgcaccaccacatctggctaattttttgtatttcttgtagagacaggatttcgccatgttgcaggctgctctggaacacctaggctcaagcagttcacccgccttggcctcccaaagtgctgggattacaggcgtgagcctttgtgtccagctgggaggtttttttgtgtagttaatctgtgttctttaccctctcctcttgcctgggatctgaagaggtcaaaagtccctggcaaaggcagaggcttttctgccactgggttcaggcttgacgttagctggacctcagcagcctcccccactcctgctcatcccttgccagctctgtcgggtgctttctactcttaggagtatgtccctgaggccctgcatccagcctattctccccagcacctgttctctgaatcagttcccactccacttcccaaccgctttcccgaaaagcatcctttggtcttccctctctatatgatggttacaataactgttaccatttatggtgtgtcaactgtgtgcaagtagctgtgctaggcccttggcatctgtgatctcatgtaatcttcaaaacagcctcaggtgagagaagtgctggccccattgcatagatggtgggctgtaggacaagatgagaggccagttttgcacatatggaaacaaatgtcttttgttttcgtttttgttttgagacagagtctctgtctcccaggctggagtgcagtggtgcaatcttggctcactgcaacctctgcctcccgggttcaagcgattctcctgcctctgcctccagagtagctggcattacgggtgcacaccaccacacctggctaatttttgtatttttagtagagatggggtttcaccaggttgccagtctggtctcgaactcctgacctcaagtgatctgcctgcctcggcctcccaaagtgctataggattgcaggcatgagccaccgcgcctggccgcaacgagacaatcaagagaagatgctgataaggagttggatatgggagtcaggaatttgggaatgaggactgagcttgagatgtaaatgtgggagtcgtgtgctggcagatattatttcaagccctgagagtggctgaggtcccccacatctattcatatgcctttggtcagtggaatgttttgcaatccacatcactataaatgaatttcctctgtctctgagagaggccgctgaggtagcagagagaaaacagctttgagggcaggcagtccaggcctgtctccccattaactgcttcaccagctaggggacctttgggcaagtcactacaagctttaaagtataaaatactttttgaggccggatgtggtgtatcatgtctgtcatcccagtgctttaggaggccaaggcaggaggatcacttgagcccaggagttcgaggctgcagtgaaccgtgacagcaacactgcactccaacctgggtgacaaagcaagaccctgtctcaacaacaacaacaacaaaagtataaaatactgtaacagacaaaaatgcatgcttgataaatgttattgatcctaagagccttttttttttttttttttgagatggagtcttgctctgtcgcccaggctggagtgcagtggcgcgatctcagctcactgcaacatccgcctcccaggttcacgcagttctcctgcctcagcctcccgagtagctgggactacaggcatccgccacgacgcctggctaattttttgtatttttagtagagacggggtttcactgtgtcagccaggagagtcttgatctcctgaccttgtgatctgcccacctcgtcctctcaaagtgctgggattacaggtgtgagccaccgtgcccggtgagccttttttttttgtttttgttttgagacagagtctcactgtgttgcccaggctggagtgcagtggcacaatctcagctcactgcaacctctgcctcccaggttcaagcaattctcctgcctcagcctcctggcctcagctgggattactggtgcctgccaccacacccggctaatttttttgtatttttagtagagacggggtttcaccatgttggccaggctggtctcgaactcctgacctcaggtgatccacccaccttggcctcccaaagtgctgggattacagacgtgagctaccgcgcccggcctttaaaagcctattttgatgggaggagggggatgctataatgtgaggactttctcccagaaaaggagagagaggcactaatgcagtggggataataattaaaatcgcttaacattttttttgaaagattaggtatgttctgaaaatagtgctgaggtttttgcattaattatctaatgtaatcctgacaacatttgaagtacctatggttattatttctattttatggatgagaaaagtgaggcctagagaggttgagaaacaagcccaaagtcacacagctagtgagtgactgagatagggttggaacttgggtatatctgaatcctgggcttgacctgtagacccctgctcctgtggactaggaaatttaaacaaagaacttcctctttttttttttttttgtatttcattatatggatgtactgagtttatttatctggttccccccctttttttttttgagacagagtcttgctctgtcgctcagacttgagtgcagtggcacgatgttggctcactgcaacctctgcctcccgggttcaagcaattctcctgcctcagcctcccgagtagctgggattacaggcatgcaccaccaagccaggctaatttttgtatttttagtagagatggggtttcaccatgttggccaggctggtctcaaactcctgacctcgtgatccacccaccttggcctcccaaagtgctgggattacaggcatgggccactgtgtccggccacccggttaccttttgatggatgtttagttgttcccttcttgctcttacggcccctgctgtggggaataactttgcatatgcctcttgttgtgtgagtgcaagtacacctgcaggatatattccccgaaggggaattgatgggcaaaggccatgagatttgtcatcgtgagacagaatagaagttgcaccaatttatacttccagcagcattgtgagaatgcttgtgtccctatgcccttgccaaaagtgtactattaacctggtatctacacagacaatggcgtctgtgtggaattaatttgcatttatcttatctgaataagattgtatgggttttttaatgtataactgacatttgcataatctactatgacctgcctgttcatattcaatgctaattttattttgattgggtcattaatcttattgtttacaggagctcttgacatattaacatgtcatacatgacttttttttttttttttttggtggtgggggtggtttttgccaagaaatttctttttttccatctctctctctctctctctttctttctcagggtctcacggtgtcacccaggctggagtgcagtgacatgctcatggctcactgcagcctcaatttcctgggactcaagcgatcctcctgtctcagacttctgagtatgaggctcagactcaaaagattggggcttttacaggtgcacaccaccacacttgactagcctttgtattttttgtagagacgggattttgccatgttgctcagactggtctcaaactctgggttcaagcgatcctccctccttggcctcccaaagtgctgggattacaggtgtgagccactgcgcctggctgcaaatttttttttccaactagttgaatttaccagtctcttttatagcttctaggttttgtgtcatacttaataacatccttcccattccaatattttatttttatttattttttgagagaatgtcaatccacctttattggaggaaaccttgcactgtaactgttttaaataatgtgtgccctgccccaccctgtgcctggtgggctcagaagatcatctccagctgccgggcatactcggtgacctgtttggccagttctgtggagggaatggtagtgtcttctggctcctgctgctggccggcaaaactatattagttgttggggcccgggacccaccctcacttcttggtgtagtcggtcatctttttgggtgtgttgaagaagaggatctggtggcctcggtaaaagggattttctcataggctttcttgatgcacccggccatctcatccctgatagtgtcaagcaggatgtcgatgaagacggtgtagctcttggcgaggatgttacccttggccaggaacactttgttgtagctgccctccattaggtattgctccagggacacagggtttttggtgtagacattggtctggatgtccttggcaggcagccactccagctccatgtggaactcagccacccgcttctgggacagcaggaagaggagattgaggcccaagagctggtgcatgtaggctgactggggaagctgttccttgtaatcaaagtagcagcatttgagctgggtcatgtggcgctggaaggaggggatgtcctcgcataggatgctccactggccccgatcttcagtatgtcacgggccagaatgagctgctgtttggtcagcttggtccctgtggttggcaagaagttgagctccagaagaactagcttgaggcagcccagctcttccctgcacttgctaagattggggcttttacggttccactcgcccttgagttgcttgtacttgccgtcctcagcctgcaggacagggccctaggtcgccaggggcccggagctcaaggcgccggctgcactgttcacctccacccccattccaatattttaaaagattctccttttctggtattgttaaaagttttaaaagtttaaatatttgatccattttgaatttattaatattatggatgaggtatgaagtctgactccagctttttctttccagttgtcacctgacatctctttacagtttattgaattcatctttcccccaccaattttcaaagttacattttaaatctaccaaattcctgtatacttgggtttatacgcctcttggcatagcgagtagttaaaagcacaaattctgaggcccaattgtctggacttgaatgcaggtcacccctaattagctatataacctcagtctcttcttctgtcaaatagactattgagaagatcaagttagttaatctatgtagcacacttagaaactgcctgtatgtgtagcaagcacttagactaagttatttttttaatgtggtaaaaacacataatataaaatgtatcagccgggtgcagtggctcacacctgtaatcccagcactttgggaggccgaggcaggtggatcatttgaggtcaggagtttgaaaccagcatgaccaacatggtgaaaccccatctctactaaaaatacaaaaagtagccagctgtggtgacaggcacctgtaatcccagctactccggaggctgaggcaagaggggaggcagaggttgcagtgagccacgattgtgccactgcactccagcctgggcgacaagagtaagactcatcctcaaaaaaaaataaaataaaataaccattttaaagtatacagatcagtagtgcagactaaactattttttatttttattagttctgaactttctagtctcttccataatttggtctccctattcatgtgccagtatcgcactgttttaattatgtagttttattttttccttcctatttttttagaggaagggtctcactctgttgccaaggctggagtgcagtgtctcgatcatagctcactgcaaccttgaactcctggactcacgcaatcctcttgccttggctttctgagtagccaggaccacaggtgcatgacaccatgactggctaatttaaaaaaaaatttttttttttttttttgtagagatggagttttgctatgttgcctaggctggtcttgagctcctggtctcaagagatcctcccgcctcagcctcccaaagtgttggcattacaggcatgagccactgcacctggccaagtaaactttagagattaattagggaacactgatgtatttttaatgccgagtcttcctatctcttggtaggcctgatggggcttatgatgagggaggaggagctggggcaggagagcccgacattcaggtctcactgaggggagatgtgcccaggacacttccactggaactgcttccttgatggtgatgtggagtgagctggaccagtgtgtgcgtgcatgtgtctacccaagctcatggcacatgggggagcggagggggtggggatggctcagcagtgattggaatgcaagagtggggactttggggcctgtatgaaaaagtgttatggcagagtgacacacctacgaaagagtgtggtcagcataggcctcacactgggtgggtttttacaaactgaacacatgcatggaaccaccattcagaataagaactgaacagaagcatcctcaggggagccctgaaatccccctatgcacacccctcaaacctccccttatccctcccagctgctccatccacacctccacgtgacttcttaaatcttcagctttgctgcctcatagctaagggggtcagggaggggaagctggggggtctgtagatatggaatgggggtgcgtacatcaggtccctccctctccctgccctcctgccaccttccagaagcacataaaaaaaatctgactgagggccagcctctttgttatactctgagactgtgctcagagatagaagacaagacccctaggccatgcttctgggaaggcagagggctgcgtgttaagcctggaccgagagtcccagagcccagctccggtcctgacaccatgcactgctgtgtgacttctgggccctggttctcctcatccaccaaaatgagcaggttggcctgagtcgtccttaagagtcctgtatagccttaaaacagcgctccttatctcagcaccctacacactggctgtagcttctcctcactgtccctttcaggaccaaaatactgggtgtatccatctgcaggtaccaatggctttactttctaaggccctgctgcgtcctgcttttaatctctttatttctctatctgctccctggggttaggtttgggccagggagtggattgtttgccctccttagatatcctttctttttttgagacagggttgcccagggtggagtgcagtggtgcgatctcggctcactgcaaactccatctccggggttcaagtgattctcctacctcagcctcccgagtagctgggattacaggcatgcaccactatgcccagctaatttttttttttttttttttgagatggagtttcactcttgttgcccaggctggagtgcagtggcatgatctcagctcactgcaaccttccggtttcaagcgattctcctgcctcagcctcccaagtagctgggattacaggcacccgccaccatacccggctaatttttgtatttttagtagagacaggatttcaccatgttggccaagctgatctcaaactcctgaccttgtgatccgaccttctctgtctcccaaagtgctgggattacaggcgtgagccacttcacccggcctaatttttgtattttttggtatggatggggtttcaccattttggctaggctggtcttgaactcctgatctcaggtgatccgccagcctcagcctcccaaagtgctgagattacaggcgtgagctgccgcacatggccttagatatcttttcctctaattagtttataatctctgagagttgacccaggttgtaccttcttggactggagccaggtggttatctctgatgctgccagaggaggattagatgttttatctcctgagttggtcacacgcgcacgtgggtctctgagtcagcattgagcattacctgtttatgggtccaaaggagcctccctcccagaccctctctccagcagtgtacagtccatcgtgtggatgggaggaaggcaaggccaaggtaaatactgactcagacaaatacaagcaggtacaagaagtacaaatacatatgtgggggaggagggagcaggggcctgccagccaaagctagtcatctgagaagagggggttgcggacaggtggggctgggagctgagtcagagaaggttgctgggcctcccattagagcctgggagccttgacttgccgtagcctgcggccttgcctcttcctggacagtggccgagggtgccctctgaaatgttaaggagaaatgaatgggcccagatggtggggtgacttggggaggacgcgagatttggagtccaaggggaggcagttttaggctctaactcatcctatacacgctgcggctgtgggggaagggagagaaaggccaagggcacgactcctggctcctgagagtccccagtgccccattaggttggcagctgcagtgatggcgctgacccccccttgtgcacacccctcaagcctcagcattcccttccctgggcctctgaagggtggaaagatgtgagaagagcagggaagaggagaggaaattgggagagggggagagagagggtggtggggagcccagagaagggagctgggggtggagcatggagaggtacctgggccaagtagagagaggctttggccaggctcatctgggtccagcgtggattccctcatgcatgagctgtgtgaatttgggcaagttccctaacttctctgatctcttgttgcctcaacaatgaaatggggacaagacttcctccctggcagactttttgtgagtagtgtgctcttagggaaagcccagggcgcagggtaagtgtcccagttgctaatgattgttatggttattatcacatcaaagccaggagccagtctcagtccaaagatggagaatgcaagaacaggtgaccaagagcactgggacttgtcctagccctcgtgggaccaaattctatacttgtttccatgtggacacaaggtgtccacaggcttctcctggaggcttctcagcacccacctacttttagatcaagaccattattgctgacaggggacctttgtttcctctgtagccccttctgaaatcctatgcctttgcaacccaagaagctgggttaggctgggggcctcctgtgctgccagctggcctgggcagcggggacctgcgtctctgctcagaaactggggtggtgagatgggattagcaggcacgagccaagcctgtgtcctcggtggcaggccaggcagctggttcaccgcttacataaacggggccaggaagctgaacttgtttttgctggcaagagctgcggcaagctgcaagagagttgagaaatatgtgtctccgtgtgcgtgtttttctctggttattgacatttgcaagtttacttgaagagggggaaaaagtagaaaaacaacaaagctgtttggattcctggcacccaaacttaggtcccaactggggaggaaccccactttcccagagctgtgctgcagggtccccagaccaaagggtgtctgggccatggtgggggtcccagtgtccctgggagggggaatcctaggccaccggggcagggagatatgggcttgcttgttgggagttactaggacctaaactctctttcccttgaggaatgggaggcaagggaggttgtgggaattttccctcccctagagctctccagggagaaagaagcatttttctgagggcactgggatgatctggtcatcatccttctcccaaagccatcaactattaaataataaatccatagattcattatgtgttttcaagctgagtattgtttgcttcctgccctctgagagctaatgattgggcgccatgggatgctagaccgcaggagtgggggcctgtgggggatctacaggtcacagtctgaatcctcatttcacagagaaggccagtgggctctgccaggggcggtgacgtgcccatggctgcctgtgagtcatcacaagaccaggaatagaactcaggtcacctgacagcacagagctgtttcctctacaccaaggggcctcctgcttgtggagatgtactttattttattttatttatttatttatttatttatttattttcaagaaggagtctcgcccaggctggagtgcagtggtgcaatctcagctcactgcagccttcgactcactgcagcctctgcctcccggattcaagcgattctcatgcctcagcctcctgagtagctgggattacaggcacacaccaccaagcctggctaatttttgtatttttaatagagacagggtttcaccatgttggccaggctggtctcgaactcctgacctcaagtgatccacccgtctcagcctcccaaagtgctgagattacaggcgtgagccactgcaccctactgagatgtactttatattaaagaacaaatcaaggcagactgtacgtttgtgtcagcccaaccccacacaattaatagtcagtgattaaactgaccagaccagaccagacaccaacactgactgttgaggaggagcttgggggtttgttttcgggaggcaatactgcctccttttgtgatcttagtcccaggtgaggtgcttccttgtcctctctgcagaatcccattctttcttagcctgggctgaagctgctccctccctgtatgtgaccctggccttggcgcagtccttgggtgctcttcctccctcctgcctctgcgctgcttcatgatgcacaggagccaaggaggggcaggggacagtcggttttttctcagggagattggaagagaacagaaacaagaagcaatggaatgctcctgtcctggaggttggtggggcagtggggagaggtggggaagccattgagcctgcacatacttttgacaggcttggctcatgcctgccaaccccatcccaccgcctgggtttctgagcagggacatgggtccccactgcccaggccagctggcagcacaggatggcctccaacctaacccaggctcttgggttgcaaaggcatagcatttcagaaggggccacagaggaaccaaaagtccccctgcctgtggagtcaggcctgatctctttgagggtgctcacaccctccatgttcccctgtaggtcttccttccctccttactgcatttcagatactccagtcaccagccctccccagaactctcactgttttttgtttttttgagacacagtcttgctctgggtcccaggctggagtgcagtggcacaatcacagctcacttcagacttgacctcctgggctcaagtgatccttctgccacagcctcccagatagctgggaccgcagacatgtgtcaccatgcccagctaattttagagttttttggtagagatggagttttgccgtgttgcccaggctggtctcagccacctgggcacaaacgatcctcccatctcagcctcccaatgtgctgggatgacaggcgtaagccacgatgcctggtgactctcaattctttttttttaaattattattattattattttggagatagagtttcacttttgtggcccaggctggagtgcaatggtgcaatctcagttcactgcaatctctgcctcctgggttcaagtgattctcctgcctcagcctcctgagtagctgggattacaggtgtgtgccaccacgcccggctaattttgtatttttagtatggggtttctccatgttggtcaggctgctctcaaactcccgacctcaggtgatctgcccgcctcggcctcccacagtgctgggattacaggcgtgagccacggcgcctggtgactcagttcttaatgccttgcatatactgttctctctttatggaatgtaactccctgtggctccacttatcaaacccccactcatttatcaaggccccaataaaatctctcttccccctttagaataattgatccctcttcttagttccctcagtatgttggagacatttatatcaggttggcctgtattacagatagttttaagttctagggctttgtggggtttaaagaagattacgatatggaaatgataggaaggagtgccagtgcattgtagatgctcagtagcttcaatatggagttttttttttcctggattaggaacttctgaacttgcacatcatgggtgcacaaaaattattgaattcttgaagaagggacaggcataggcttgcaatcctggctctgaatgctgagcaattgctcacggacaaatgctccgttgattgtgtgctctttgctaaatttcagtgtgtgcaccagccacgccttcgcccccgcgtgccccgtctcctagggcctactatgcaaggcctgtgtcaggccggggtgggagcatgagaatgactgggcatatctcccaggaccaggaaggactgctcctcaggagccccctcctcacctggttcctcatcgtgtctcttccttttggcccttctctttggtagggcctacttagggagggccccagcagattcccaggggaacagaaaaacagacagatgggaggaatcaaggctgagcccagggtatggtgtcttgtgtccaccagggaatcaggcctacaggggagggctgggctatgggtgcagaattcagtgacagtgacagtgagagaactcagcagtgcaagggcaaagtggcactgtttggcctgaaggtgctcggaagctgcttgnnnnnnnnnnnnnnnnnnnnnnnnnnnnnnnnnnnnnnnnnnnnnnnnnnnnnnnnnnnnnnnnnnnnnnnnnnnnnnnnnnnnnnnnnnnnnnnnnnnnnnnnnnnnnnnnnnnnnnnnnnnnnnnnnnnnnnnnnnnnnnnnnnnnnnnnnnnnnnnnnnnnnnnnnnnnnnnnnnnnnnnnnnnnnnnnnnnnnnnnnnnnnnnnnnnnnnnnnnnnnnnnnnnnnnnnnnnnnnnnnnnnnnnnnnnnnnnnnnnnnnnnnnnnnnnnnnnnnnnnnnnnnnnnnnnnnnnnnnnnnnnnnnnnnnnnnnnnnnnnnnnnnnnnnnnnnnnnnnnnnnnnnnnnnnnnnnnnnnnnnnnnnnnnnnnnnnnnnnnnnnnnnnnnnnnnnnnnnnnnnnnnnnnnnnnnnnnnnnnnnnnnnnnnnnnnnnnnnnnnnnnnnnnnnnnnnnnnnnnnnnnnnnnnnnnnnnnnnnnnnnnnnnnnnnnnnnnnnnnnnnnnnnnnnnnnnnnnnnnnnnnnnnnnnnnnnnnnnnnnnnnnnnnnnnnnnnnnnnnnnnnnnnnnnnnnnnnnnnnnnnnnnnnnnnnnnnnnnnnnnnnnnnnnnnnnnnnnnnnnnnnnnnnnnnnnnnnnnnnnnnnnnnnnnnnnnnnnnnnnnnnnnnnnnnnnnnnnnnnnnnnnnnnnnnnnnnnnnnnnnnnnnnnnnnnnnnnnnnnnnnnnnnnnnnnnnnnnnnnnnnnnnnnnnnnnnnnnnnnnnnnnnnnnnnnnnnnnnnnnnnnnnnnnnnnnnnnnnnnnnnnnnnnnnnnnnnnnnnnnnnnnnnnnnnnnnnnnnnnnnnnnnnnnnnnnnnnnnnnnnnnnnnnnnnnnnnnnnnnnnnnnnnnnnnnnnnnnnnnnnnnnnnnnnnnnnnnnnnnnnnnnnnnnnnnnnnnnnnnnnnnnnnnnnnnnnnnnnnnnnnnnnnnnnnnnnnnnnnnnnnnnnnnnnnnnnnnnnnnnnnnnnnnnnnnnnnnnnnnnnnnnnnnnnnnnnnnnnnnnnnnnnnnnnnnnnnnnnnnnnnnnnnnnnnnnnnnnnnnnnnnnnnnnnnnnnnnnnnnnnnnnnnnnnnnnnnnnnnnnnnnnnnnnnnnnnnnnnnnnnnnnnnnnnnnnnnnnnnnnnnnnnnnnnnnnnnnnnnnnnnnnnnnnnnnnnnnnnnnnnnnnnnnnnnnnnnnnnnnnnnnnnnnnnnnnnnnnnnnnnnnnnnnnnnnnnnnnnnnnnnnnnnnnnnnnnnnnnnnnnnnnnnnnnnnnnnnnnnnnnnnnnnnnnnnnnnnnnnnnnnnnnnnnnnnnnnnnnnnnnnnnnnnnnnnnnnnnnnnnnnnnnnnnnnnnnnnnnnnnnnnnnnnnnnnnnnnnnnnnnnnnnnnnnnnnnnnnnnnnnnnnnnnnnnnnnnnnnnnnnnnnnnnnnnnnnnnnnnnnnnnnnnnnnnnnnnnnnnnnnnnnnnnnnnnnnnnnnnnnnnnnnnnnnnnnnnnnnnnnnnnnnnnnnnnnnnnnnnnnnnnnnnnnnnnnnnnnnnnnnnnnnnnnnnnnnnnnnnnnnnnnnnnnnnnnnnnnnnnnnnnnnnnnnnnnnnnnnnnnnnnnnnnnnnnnnnnnnnnnnnnnnnnnnnnnnnnnnnnnnnnnnnnnnnnnnnnnnnnnnnnnnnnnnnnnnnnnnnnnnnnnnnnnnnnnnnnnnnnnnnnnnnnnnnnnnnnnnnnnnnnnnnnnnnnnnnnnnnnnnnnnnnnnnnnnnnnnnnnnnnnnnnnnnnnnnnnnnnnnnnnnnnnnnnnnnnnnnnnnnnnnnnnnnnnnnnnnnnnnnnnnnnnnnnnnnnnnnnnnnnnnnnnnnnnnnnnnnnnnnnnnnnnnnnnnnnnnnnnnnnnnnnnnnnnnnnnnnnnnnnnnnnnnnnnnnnnnnnnnnnnnnnnnnnnnnnnnnnnnnnnnnnnnnnnnnnnnnnnnnnnnnnnnnnnnnnnnnnnnnnnnnnnnnnnnnnnnnnnnnnnnnnnnnnnnnnnnnnnnnnnnnnnnnnnnnnnnnnnnnnnnnnnnnnnnnnnnnnnnnnnnnnnnnnnnnnnnnnnnnnnnnnnnnnnnnnnnnnnnnnnnnnnnnnnnnnnnnnnnnnnnnnnnnnnnnnnnnnnnnnnnnnnnnnnnnnnnnnnnnnnnnnnnnnnnnnnnnnnnnnnnnnnnnnnnnnnnnnnnnnnnnnnnnnnnnnnnnnnnnnnnnnnnnnnnnnnnnnnnnnnnnnnnnnnnnnnnnnnnnnnnnnnnnnnnnnnnnnnnnnnnnnnnnnnnnnnnnnnnnnnnnnnnnnnnnnnnnnnnnnnnnnnnnnnnnnnnnnnnnnnnnnnnnnnnnnnnnnnnnnnnnnnnnnnnnnnnnnnnnnnnnnnnnnnnnnnnnnnnnnnnnnnnnnnnnnnnnnnnnnnnnnnnnnnnnnnnnnnnnnnnnnnnnnnnnnnnnnnnnnnnnnnnnnnnnnnnnnnnnnnnnnnnnnnnnnnnnnnnnnnnnnnnnnnnnnnnnnnnnnnnnnnnnnnnnnnnnnnnnnnnnnnnnnnnnnnnnnnnnnnnnnnnnnnnnnnnnnnnnnnnnnnnnnnnnnnnnnnnnnnnnnnnnnnnnnnnnnnnnnnnnnnnnnnnnnnnnnnnnnnnnnnnnnnnnnnnnnnnnnnnnnnnnnnnnnnnnnnnnnnnnnnnnnnnnnnnnnnnnnnnnnnnnnnnnnnnnnnnnnnnnnnnnnnnnnnnnnnnnnnnnnnnnnnnnnnnnnnnnnnnnnnnnnnnnnnnnnnnnnnnnnnnnnnnnnnnnnnnnnnnnnnnnnnnnnnnnnnnnnnnnnnnnnnnnnnnnnnnnnnnnnnnnnnnnnnnnnnnnnnnnnnnnnnnnnnnnnnnnnnnnnnnnnnnnnnnnnnnnnnnnnnnnnnnnnnnnnnnnnnnnnnnnnnnnnnnnnnnnnnnnnnnnnnnnnnnnnnnnnnnnnnnnnnnnnnnnnnnnnnnnnnnnnnnnnnnnnnnnnnnnnnnnnnnnnnnnnnnnnnnnnnnnnnnnnnnnnnnnnnnnnnnnnnnnnnnnnnnnnnnnnnnnnnnnnnnnnnnnnnnnnnnnnnnnnnnnnnnnnnnnnnnnnnnnnnnnnnnnnnnnnnnnnnnnnnnnnnnnnnnnnnnnnnnnnnnnnnnnnnnnnnnnnnnnnnnnnnnnnnnnnnnnnnnnnnnnnnnnnnnnnnnnnnnnnnnnnnnnnnnnnnnnnnnnaaaagcaccagctgggcgtggtggctcacgcctgtaatcccagcactttgggaggccgaggcgggtggatcacctgaggtcaggagttcaagaccagcctgactaatatggtgaaaccccatctctactaaaaatacaaaaaaaggaaaaaattagccgggcatggtggtgtgtgcctgtagtccccaactactcgggaggctgagacaggagaattgcttgaacccaggaggttgaggatgcagtgagccgagatcgcgccattgcactccagcctgggtgatagagcgagattctgtctcaaaaaaaaaaaaaagaaagaaaagagaaaagcatatcacagcagaagactatattcaaaccatttatatgaagctcaaaaatgaagcaaagttaagaaaaatgtagggatgtatgggtagtgaaagttaggttggtgggctttcctgggtattttatgcttcataaattaacttttatgtatgtagcttttacatacattatatatatgaatttgcatgtattcagtattatgtaatacattaaaaacaatgttcgcaatgctaaaaatatattgttgaagattctgtgtgaaagctatactgtagttgtggctttttataaccctttcaagccctctgggcagtagcagtccaccccttattgccctcagtggacttcaccttctagggactcagaatttttttttttttttttgagacggagcttcgctctttttgcccaggctggagtgcagtggcgtgatctcggctcactgcaagctccgcctccctggttcaagcaattctcctgcctcagcctcccaagtagctgggattacaggagcctgccaccacgcccagcaaattttttgtatttttagtagagacagggtttcaccatgttggccaggatggtctcgatctcttgacttgtgatccgtctcgcctcggcctcccaaagtgctgggattacaggtgtgaggcccagctgggactcagattttgctgaggaccaggacagtactgtgtgctgtgtcctggccttgcagcagtgaatgtgtctcccgtttctcaagggcaggtctctgggatgcctgactgtgtcttccttgccagtgcctggctgctgcagcctcctcaaatgtttatcaaacacaggacttgcccaccgtgggagaaagtaaggccataggtgtctcaggaacctgcccaaactcgcctggctgcacggtgacaattcaaccagctttcttacccaaggtctgttggtgaccagagaaaaccttagatgaccggctgccatgatggccttatatctgtcccttttctgccagccttgaggtagagggtgccagggaggaggactctggctctaggtgttaaagtgagagggaagtgtgaagggtatctgtatagctagacagggctcaatgccaggcagagctgtctccgcccctttgatgtctatgtctctgtccctggactgtggccagtagccagtgtggactccaacctcaccagctttaggggtgttatctgcctgggagtcactgatccttactccctcctctgacagccaccttggatggggtgaaaggaaggacagcctgccaagtatgagataaaaacgcctcataaacaagaagggatttgcaggccaggcagagagccttgtgctgcttctgagtcccaggagcatgggcgaggaggtgaggtcaggcactcagcagctgctggtcctctctgaaatctttggccagatttattgctactgcttgctaataaatggttatgcatttggttcaaaggaccaagtgtgcttacatgaaaactggctgtgttccctggcctctgtttccttagctggttggactaatttgattggttaataaatgagtccaaggtggttgggctaatttttatcttagattctatgactctataactgctactcaaaaaaagtgtacttgttcctttaatctttaatcttatttttcttgagtagtagaatacacccaatttttttcaaggggtagagaatgcattttttttttaaccttccagtttggtccctagagtaaacacagcattgctgtagtagatgtagggtactggagggagcatggaacagggaaccagaagccctggttcctaccccagctgggcatctgggccagtctcttgattcctctgtgcctcagttaccaactatataacgggcattctgccatgaataccctgcgatttggaaacctcctgtgtacgtgtgcacttgggtgcctggcattcattcctaatggcatccattcgttcacacattcatccagtactcagcagactcctgccatgggccaggcaacgtcccgggcacttggaatataatggagaacaaagcagggtgcctacttctgtggtgcttggagtcttgaggggaagagagacacggaattcgtaattacatggcagcgtgtgggtgacgtattgcagaatgagggcctagtggagctgggggaccggaaacgatgtttaggccgagacctggaataggaggagttgtcgtggggatgatgtaggaagaacgagtgtgaggaggagagcgaggggagttgaggggagggctccacaccttctaaggagtggggagagatgaggcctccaaggacagaagggccctgcaggccacgctgaggagcttggacttcatcttgtggatggtggcaggcccttgaagggttttctaatccagggagtggggtggctggatcatggcttcagaaggctctcccaggcagctggatggtgaagaccaggttggggaggtcaccaggagaatgctgccctaatccaggcagaggtgacggtagcctgggccacttcatcattatcactgaggcctctcgtggcttcctcagaccagaacgaagcccccttcttcagtggctgtgggctcaccaagtgtcttctccctcctccagaggtggcgagaggcgtgctgaccagtctgccaggagacagcgtgactctgacctgcccgggggtagagccggaagacaatgccactgttcactgggtgctcaggaagccggctgcaggctcccaccccagcagatgggctggcatgggaaggaggctgctgctgaggtcggtgcagctccacgactctggaaactattcatgctaccgggccggccgcccagctgggactgtgcacttgctggtggatggtgagttgtgcctcagaggtcccggagatagttcccgtaagaaatgaggctttgtgcattccagacagtccctgtctgagccttcaaactcccaccatttccttggcgcaagaattttggggaaggcccaccaatgtctgccatccagatgctggcaaagactgctgctgggtgggagtgggagcgtctgactggtggggaacattggctttgggagttaggacttttggtgaactggtgaatagcctggggcccggagtcaggcagcctgggtttgaatcctgctccctcacatacagcttaacttctccacccttcagtttcatctttggcaaaataaggttaattttattaccttaccttagagttgttgcaaagggggtgtatgtgaatttgcgtatgtgtgtgtgtgtatatcacacacatatgctgctaaaaagtctgcatagcccatcctaagctctcaaattagctattcttatttttttagaattagcaagttcttagctccctcatacctagataaagacttcctggaaccagtgccctgtgtgtcgagccctatgccaaggcactttcttccttgtatctcttgtaatccttcagcagccttgtcagggaaagcaggcttatcatcatttccatcatcattacattatcatcagtttattttatacatgaggaaactgaagagcagctaggacttgcccaaggccgcacagccaggtctgtgtgactccaaagccctttttttcgatcatcctctctccccttcagacaagttggtcctgaggttcttcccttcccctgtcccgggatccgtgtctcagactgaaaggaggactttggtgtcctttaatttcccagctgcgattccattcatgtgtggctgagtgtggccagggtcctgactagctccagggctggggccgaggggcccagccacgtgctcccctcaagggaggctgccctgtctgcgaggtcagtgcgccccaggatccccgcccgcctgctgacacctgcaatgctttcctttcagttccccccgaggagccccagctctcctgcttccggaagagccccctcagcaatgttgtttgtgagtggggtcctcggagcaccccatccctgacgacaaaggctgtgctcttggtgaggaagttgtaagtatcttgggctgagctatgtgcatgttggctccctccttcccgaggccccccagagaggggctggttcaggtgatttcaaaacattatcattaggaattaattccttcaggctgaggaagaggagatgagagggaactgagatttacatttgactgccccccctgagctaggcactgtgcttgtgcttggaaccttgtcctattcacttgaccttggttatcacaacagctatgggaagtgggctttatttttctcacttaacagatggagagactgaggcccagagactgattaacaggtttggttcacttagctagtaagtggctctgctgggaattcaatcccagtctgtctgatttcattcaaagtccgaagattatgggcgttgctctgaaaaacatgcaaatatccctgggagggggtgtagcacagccagaccattatcagtgtctgggcccttgtgggcgtatcaggctatttccatgataaagacacgagagagaaagcggtgatgggcgggggagagggagcttggggccgtggggggagaagtcacgcctgcctgggggctctgcatcatcaccggaagacggcttaacgtgggaagacctgggatgggttcaggcatggatgtagaggaggtggaagatgctgaaaacaaatctgcctctgcagttttgctggtctccatcccagagccacagtctcccttagtccagaggtttacaattgagtttgagctgtcagtcatcagaatatagggcaaggaggtcgcattccaagacccctagtggatgcctgaaatcgcaaatggtgctgaaccctatatatagtatgtttttctatagatatgtacttatgatagtttaatttataaattaggtgcagtaagaggttagcaataactaaaaatagcatagaacagtgataacaatatactgtaataacagttatgtgaatgtggtctctctgtttctcaaaatgtcttattactgtactcacccttcttgtgatgatatgaggttgtgaaatgcctgcatgatgggatgaagtgaggtgaatgatgtaggcattgtgactcagtgttaggctactagggctttctgaccatgtgttagaaggaggatcagctgttttgggtgactctgggtcaccgagccatgatgatggcggtggatgtcaggacgagtgatgggtagcatgcacagcgcaggaatgctgaacaaagtgatgattcatgtcctgggcgggacggtgtgaaatctcgtcacacttctcagaacagtgggcactttaaaatttctgaagtgattatttatggaatttcccatttaatatttttggaccgcagttgaccacaggtagccgaaatcttggaaagcaaaacctcagataaggcaggactactgtatcagaaagccagagcagtgacttcaatagggtggttcagctcccacttgggtctgtttccatagagttactgggctgcctggcagtcatgtttttgttctgtcctctatgatgaaaagtgcggattaccatctgtgaatgatgcagctgccattagcactgtcagctcatgccccaagcctggatagcttcacagcccagcaaaggatacaccttgtttgtacctcaaaggcttgtaccatagataggattagccaggatagagactgtggctggcagcttcccaggccagcctgtggaaagctctgtcatttctgacacttcaactgaaatacttttttttttttttttttgagatggagtttcgctctgtcgcccaggctggagtgcagtggtgggatctcggctcactgcaatctccgcctcccgggctcaagcgattctcctgcctcagcctcctgagtagctgggattacaggcgcacaccaccacgcctggctaatctttgtatttttagtagagatgaggtttcaccatgttagcggggctggtctcgaacttctgacctagggtgatccgcctgtctcggcctcccaaagtgctgggattacaggcgtgagccaccgcgcccggcttgactggaatactttccatgttgacagcgggagtgggagagagtacagtgcttgtcctcccgagcagcctcgtgcctttgcttccatctgctttgaagagtcagcatgaccactgggcgcctttgaagtgaggaaagagcaggggaagtggcttcgagagcctcaggggccccagcccccactgaggccccacccagacctcaggccactgcagggcctggaagagacaggcccctggaaagggattactgggagctctgctttttctcttgtgtgtctgctttcacacccttgcccaactgcagcactgctccctccttcttccacaggcaggggtgagctcagcctctgccttggaccaggcgcagtgctggggcagtgggaggaagcgggccaacaagactgagccccggccctctgaccccacctgggcacacacgtaaagcagtcggtgaccctgccttcgtggctgggtggaagcctgggtggtgttgggggaaggaggaaaggggctttaactcagcctggaaaggttgggtttgtcccatgtgctggattcagcaggagcccagggttcgaacccaagtcagaggtggcagactcgtcaccccagctggagggtgagtggttgacgtggcctcacatgcccacatgtgtcataagagggtgaagcctcaggtttccaggccaggtgggatggtggctgactcacctcgaatgtcttcagttacccagaattcttttctggactcacctgccagaacccctctagcactttttgtgtctctggagtggcatttctgctgggtgtctagtcatctgaggacagatcttttttgttagtgccttgaaggcagggtggggcctctcttgattcatttctatatcccctacagtgccaagagcacaggcccagcgggagaccagagctggccagccgaccattgcctgagtgactagctgagccctccagcctagctcccctcacccctcgtgccaggcgctaggctacatgtttatatatatttgtaaatccagctagtttcctcatctctagattttacatttattgctcaatttttttttttttgagatggagtctctgtcgcccaggctggagtgcagtctctgtcactgcaacatctgcctcctgggttcaagtgattcttctgcttcagcctcctgagtaactgggactacaggcatgcgccaccacgccaggctaattttttattttattttttgtatttttagtagagacagggtttcaccatattggctaggctggactcgaactcctgacnnnnnnnnnnnnnnnnnnnnnnnnnnnnnnnnnnnnnnnnnnnnnnnnnnnnnnnnnnnnnnnnnnnnnnnnnnnnnnnnnnnnnnnnnnnnnnnnnnnnnnnnnnnnnnnnnnnnnnnnnnnnnnnnnnnnnnnnnnnnnnnnnnnnnncgtgagccccgcgcccggccttatttctcagtcttaacagaaccagccacgtgtgattgttcatgcctgtaatcccagcactttgggaggctgaggcgggcagatcacctgaggtcagcagttcgagaccagcctgggcaacatggtgaaaccccatctctattaaaaatacaaaaatttgctgggcacgctcaggaggctgaggcaggagaatctcttgaacctgggagggaggcggaggttgcagtgagccgagactgcgccactgcactccagcctgggtgacacagtgagactctatcacaaaaacaaaacaaaacaaaaacttaacccctactaggtaagtagtattaatattcctattttcaaatgagaaaaggagacttagaggcacagggcttataagtctggagctgggattcaaaccccgggattccacttcccccttctgtcccgtcttgagtctgtgcgaaactgacaggcaagccctgcccttgttttgtgtctaacagtcagaacagtccggccgaagacttccaggagccgtgccagtattcccaggagtcccagaagttctcctgccagttagcagtcccggagggagacagctctttctacatagtgtccatgtgcgtcgccagtagtgtcgggagcaagttcagcaaaactcaaacctttcagggttgtggaatctgtacgtaagctctaaccccctctccagcagtttccttctcttttgatttaatactccttatcgacttctcagagtggcagggaaggggtggttgaggggtttggtgagttggtgccttttgggcgttgcttgccgggaggtgtggcaatgataaagcaggcccttgtggagctgtgcatggggagtgaacggggctgggtggggccctgcttgctgggatctcagcctacatgggcttctctacactatatttggtgctgcaaaggagtcatgctcacttttcccacagtgcagcctgatccgcctgccaacatcacagtcactgccgtggccagaaacccccgctggctcagtgtcacctggcaagacccccactcctggaactcatctttctacagactacggtttgagctcagatatcgggctgaacggtcaaagacattcacaacatggatggtaaatttatgttttacttctggtcagagaggcgcccctagatgcttaggcgtagtagaaagggtactagaggccaggcatggtggctcacgcctgtaatcccggccctttgggaggccaaggtgggcgaatcacttgaggtcaggagttcgagaccatcctggccaacatggtgaaataccgtctctactaaaattacaaaaaattagctgggtgtggtggcgcacgcctgtatcccagctattcgggggctgagacaggagaatcccttgaacctgggaggtggaggttgcggtgagcagagatcacaccactgcactccagcctgggcgacagagttagactccatgtcaaaaaaaaaaaaaaatagaaagggtactaaaaggaaaaccataggctctagttcctgcttcacaattggctaccttcgttgctttggataaatgttttaagctttctgagccttggtggtatatcatttattaaatgaaaaggataatgccaggccagtctcctcttcccgggcttgtctgtgaggagagcaatgtgggaagagatttgggctgtagacatgtcaagggttgtggcttgcaggattctatagtgcatgggtggggcagggactttctgcttcagcttccgtgggccctgagggcaaccccctctctagcagagcctctggggttgtgggagcctctagaggcctccgccagctgaagcacagggctggccaaggcaccaacccactggggtgctacctgcccagcaccatcctggatacctccccagagtcaccgtgcccccgccctcaggtcaaggacctccagcatcactgtgtcatccacgacgcctggagcggcctgaggcacgtggtgcagcttcgtgcccaggaggagttcgggcaaggcgagtggagcgagtggagcccggaggccatgggcacgccttggacaggtactgcggtgggcactgagaaaggaagggatgtttcaactgtcattgcatcaggtatccattgctatgtgacaagttgcctcaaaactagtggcttaggccaggtgttggtggctcacacctgtaatcccagcactttgggaggctgaggcgggtggattgcctgaggtcagcctggccaacatggtgaaaccctgtctctacgaaaaatacaaaaaattagctggacatggtggcaggtgcctgtaattccagctactcaggaggctgaggcaggagaatctcttgaacccaggaggcggaggttgcagtgagccgaaatcgcgccactgcactccagcctgggtgataagaacgaaactccgtctcaaaacaaacaactagtggcttaaaaacgaccatcatttatcggcttgaaatttcaaaaatacagtcagttaggcagctcttctgctggtcttgcctgaatcaggaatgcagctgccatcagattgggatggtctgagatggcctcagtcacatgtctgacgatggtgctggctggtggccgaggccctgggttctccctgtggcttctcatcctcagctgccagcccagactcagggcaggcgggtggggatcccaccacagctggagggatgcactgcagagaagttagccgtatttaatctagggctttttatttttttcaaatgttaaaggtagtaataattgccattggggattgttgaaattagagcatgaaaaattccagaaagatatgaagaataattatcaccagtacttttactccctagagaaaaccagtgagaacatgttagtatgctgctttcctttttctaggtacatgtatgtgtgtgtgtatttatatatataaatgtaatattccccatgttgtcaattacttttggaaacttattatttagtaactgcctgattaatacatatattttaaaactccatggaaatttgttgttgttgttgttgttttgtttgtttgttttgagacggagtctcactctgtcacccaggctggagtgcagtggcatgatcttggctcactgcaagctccgctttccaggttcatgccattctcctgcctcagcctgccgagcagccgggactacaggcacctgccaccacgcccagctaattttttctattttttagtagagacggggtttcaccgtgttagccaggatggtctcaatctcctgaccttgtgatccacccgcctcagcctcccaaagtgctgggattataggcatgagtcactgtgcccggtcggaaattttttttaacttaaatttttttttttttgaagacaggctttctcctcgttgcccaggatggagtacagcagtgcaatcacagctcacggcaacttctgcctcctgggttcaagcaatcctcccgcctcagcctcctaagtagctgggaccacaggcgtgtgccacaatgctaattttttaaaaatgttttgtagagacagggtttcaccatgctgcccaggctggtctcgaactcctggcctcaagtgatccaccagcctcagactcccaaagtgctgggattactggtgtgagccactgcacctgactaaactttaaatttttttttttagacggaatctcgctctgttgcccaggctggagtgcagtggcatgatattggctcactgcaagctctgcctcttgggttcacgctattctcctgcctcagcctcctgagtagctgggactacaggtgcacaccaccacgcccggctaatttttttttttttttagtagagacggggtttcactgtgttggccaggctggtcttgaactcctgacctcgtgatccacccgcctcgccctcccaaaatgctgggattacaggtgtgagccaccgcgcctggcctaaacttttaaaattttaatcaaattaatacatgcacatggcaaagaagtaataaacagcttataacactgagcagtggtcccttgtcccatgccttccatttctagtcctgctttctaaggaagctgcttgactctttctgtttctagttcctctgttggtgccctccttaactctaaacaacaagcttatatggcttttttttttccctgataaaaccacttgagacattatctatcaacaccctgctatgaaaggttaggatttagcagatctagaatgcaagaatctccctgaccacaacccagagagtggtcagccagcctctgcttaaatgcttccagagacagagagcttactaccccttgcagcaatctgttttattgttcccagtgtttttgttgtagaatggcttcatggctcactttggggtcaaatgtttctagccctgtggcgtagttgaaccaaattaatcattcttaaatacttggcagttaggaaaaaaaaaagaataagatacccatttatttgagtaagtatggataaaaaggaaaaggtagaattgacatcagtcccatcccgacccctgccactttctcccagccctggccccagggagagaaggcttttatctatgggctgcacattcttcccccagattggatggtgtggggtgatggctcttcctcctggctggctttgtactgtggggtccttgtcccttgtctttcctgtcctggggagagccagaggagtatgctggggcttagggtgtaatcctagttggatgcaataatatgaagtgccggcttccatctttgttggcactttccttgttcatcaaggacaggaggcagctttctattgggccctctcctcaaaagcttttttcctgctcagacctggacaaggagtggggcctaactactctatcttacttagggagaccattttaataaatcagtgcatccttcagggtagatcgtattgacctgtccatggttttctttgatttgtgtatactttgagccaaacacactcatttatctgaatgctgagcatcagtatggctttgggggcctttttaaggggggaaaaatcagctctaacatcgtgcagaggaataggaattccaaatataggctgatccctattttaccttttattccaaccacttagttcagatagtcacaagcagcttaaagcttgtgacaagcagcttaaaagcaatcttgcttttttataaagtttcttctaaaaattttcaaattgtaaaatgtacataagatttaccatttatattattattattattttttgagacggagtctcgctctgtcgcccaggctagagtgcagtggcgtgatctcagctcaatgcaacctctgcctcccgggttcaagcaattctcctatctcagcctcccgagtagctgggactacaggcacctgccaccatgactggctaatttttatatttttagtggagatggggtttcaccatattggtcaggctggtcttgaacccctgacctcaggtgattcacccacctcagcctcccaaagtgctgggattacaggcgtgagccaccgcgccctgcccatttatattatttttaagtgcacagctctgtggcattaagtattgttgtgcaaccatcaccactttacttctccaggacttttttcatcttgtaaaactgaaactcagaatctgttaaacagtaactttcctttcacccactccttcccccagctcgtggcaaccaccagtctacttgctttttctgtgagtttgactactctagtacttcatttgcttgcttgcttgcttgcatgcctgcctacctgcctgcctgccttcctttgtctctttctgtctctctctttttctctttttttttgagacggagtctcactctgtcacccacccaggctggagtgcactgtcgtgaccttggctcactgcaacctctgcctcccgggttcaagcaattctccagccttagcctcctgagtagctgagattacaggcgcctgccaccatgcctggctaatttttgtattttttgtagagacaaggtttcaccatgttgcccaggctgcactctaggtacttcaaataagtggaatcagagagtatttgtcctttggtgactgacttatttcacttagcataatgtcctcaaggtttattcatgtggtataacatgtgtcagactttcctccctttttaaggctgaataatattccattgtgtagagataccacattgtgttgattcattcatttgtcaggggacactgggtttgcttccccattttggttgtgcataatgctgctatgaacacgggtgtaaaatatctgtttagattcctgctttcagttcttttgtgtatatactcagaattataattgtggcattatatggtaattctatttttaaattttcatggaaatgccatgccgttttccacagtggctgcaccattttacacttacaccagagtgtataagggttccagtttctccacatccttgccaacatttgttatttttcattttgctgcaatagtcctccttatggatgtgaagtgttatctcactgtggttttgatttgcatttccctaatgattaatgtctttttttttttttttttttgagacagagtctcaccctgtcacccagtctggagtgcagtggggcgatcttggctcactgtaacctccacctcctggggttcaagtgattctcgtgcctcagcctcccgagtagttgagattggcatgcaccaccacacccagctaatttttgtatttttagcagagacggggctttgccatgttggcgaggctgctcttgaactcctgacctcaagtgatctgcccatctatgcctcccaaagtactgggattacaggcgtgagccaccacacccaggctgaggatcttttcatgtgcttcttggccattcatatatctttggagaaatatctattcaaatagaaagttctttcttatgtgaacctaactctggcctcactggcccttgctctgttctcagggataaccaatgacaaatttcctagtctgctctctctgaattcttttggagttcccagacctgcatctgcttgggctcctcttcccaggctgttacatgagatggtctgtgaattcttcacctttctggcccccttcccctgaatctggtctcatttgtggatgtccctctttaagttgctgacactctccttctattggaagatggtgtggtgggggctgtctggccagcactgggtacggtctccactttccagcctcaggtggatgtgcttctttggcatagacacagcttctgtgggagctcagatagaacagtcggtttcttctcatgtaaggagcggaagactttgagccctccaccctatgcatgtgtggtttgaggcaggggaagtcttcaaaacccagttgtgaatatatccaagaaagaaacctgctgctcccctctctgctgagggaagagcaagaggaacttggatgattttgacgcaagagggggattcaggttggaaattggcgggcagttctgaaaaataaggggaaggttagagcactaggtgaggtgtgtgttatggaccacggttatttggctgttagggacgcatcagtgtactaaacactgtatcaccgtgtggggtgagcttacccaccccaaggaccttcagctctcaaggcccagacagacaggatgcacctgcctcccagactaggtgtgggagtggtggcctttgggagacacagaggtcctgggaagcacctgggagtcaggttgtatgacactggtaaagttagttcagctctcagagcctcagtcttgtcatcggtaaagtagagatgatagcaccaatcttgttcctttcagagagtttttgtgagtctgatgaaaaaatattctttagaaatgctaaagcatactgcatttgtaaggggatcagcaattacaggacagtgctggttcttgggaggagagtgggaccaggggcatcccagaatcactatcctggatgccatcgtgaactcactgcattggaatctggaggaggaagtagagtgggtggtttgagaaagctttcctggtggttttagtatgtgcttgagggggctggaggagggtgcgtgccccactgtagtatgtctaatacgtaatagatggtgttcacagcacgataaggccgtaagcagactgttctgttggggcagtttagagatagcaggaaaagcttcatggaggaggtgacaattgaattatgtcttgaaggatgtgtaggagggtcccagacagaaaatggggattgtaggcagagtacaaaggcacggagctgtgagcaaggggagggtggcagagagctgcttggtgaggccgacacgtgtgtgggtgggtggtctgagtgggacaggtggaggccggccttggtgggcccctgtaggagtggaagtggaatgccatagagtggggctctggagcctggacttcagcaggtgctgcccccttgaggctggggcctggccccccgcacagactgtagcccaggatagccttttgtatgaagttgggggtcccagggtcactctgtcttagccctgctttggccagcaaggccagcacggtcggcagctttctctcaagcgggagttctgaatttatcctctccctgatgggagttctccctgtcacatcaacattgagtctgggggaatcacaaaatcattttcttctttttttttttttcagagatggtatctcattctgttgcccaagccggagtgcagtggcataatcatagctcactccagccttgaactcctgcctcagcctctgagtagctaggactataggcatgcatcaagatgcccagctaattttttaaaaaatattttacagagatgaggtcaccctatgttgcacaggccttgagtgatcctcctgcctcagcctcccaaagctctgggatttatagccatgagccactgtgccaggctggagccccttttcaaagagggcgtggggcaaaatgcctgggaaaagcccattaggtataagggggttattccttgcttctcacaaataatccctttaactccctctcctattccccaagaatgggaatcacacctgttggaggaggtgataccaaaggtttgcatttgcacatgagggggtgccctgaagccaggactgggcggtcagtgcctccagctacacgttatcttctcaaactctttggccatccattctggaggagtttgttttgttcctctctgcagcactcccaagtgggacattctggggttaaagagccttggttacacatttccggagagattttgccctgttcacttatccatatggcatccctgaattccctctctgccctgttttctgcagctttctggaacattccactggggccccgcccacttccactgcatcacctgccactttgtgcagagcactggctctggagtcaggcagcattgggtctagttgctgcccttgcccttgactagcacgaccctggggaagtacctcactgagactcagtttgcttatttgtcaaatgggaataataatgcctgcctcaaaaaacccaaaccccagccttgctgggttgtgaggcttcagtgaggtgagaagcaattagcacagagcctggcacatgacaagggtgcaataaatgccagcatgactgcctttcacccgtatctcctgccaagcctgtctctcgagctttggattcatgtcttcaacttggcccagacttctggccagatcctccctcctgtgccaggtgctccgcatgacccaaaccaaacatatcacacccctcacagatctccctgccctgcttgtccaggggacaccccacccacccagctacccagccaggagcttgcacatcgcaccaaatgtctctgccttggtttgggttcttgccacatctcaatagcatctagcagtcagccattctgttgcactccactcttcgtgcccctctccacgaccctcctccctcatcctcgcattgcctatccgcctgacatccttgtgcacaactgggtgattcctaaacgttgggatttcacgggtctgtaaaatttcaaaaacaattctggggaccaattaaagttgctagctttttttttttttttttgaaacggagtttcgctcttgttgcctaggctggagtgcaatggcgtgatctcagctcaccgcaacctccacctcctgagttcaagcaattcccctgcatcagcctcctgagtagctgggattacaggcatgcgccatcatgcccggctaattttgtatttttagtagagacggggtttctccatgttggtcaggctggtcttaactcttgacctcaggtgatccacccacctcagcctcccaaagtgctgggattacaggcatgagctaccgtgcccggctggttgccagcttttaattttgctaagtaaggacataaaatgtaacaagtaagtgataaatagctattagcatttaccatcaccataatttcataaaagaaaggatgcttggtcaggcgtggtggctcaggcctataatcccagcactttacgaggctgatgggggaggattgcctgagcccaggagatagagaccagccgggcaccataaggagaccctgtctttacaaaaaaaagttaaaaaaaaattagttgggcatagcagtgcacacctgtagtcctagctaagtgggaggctgaggtggaaggatcacctgagcccagcagttggaggctgcaatgagctatgattgcactactgcactccagcctgggcaacagagggagaccctgtcttaacaacaaaaagactccttaactgccccccacacccgccccccccaaatgaggaagggtgaaacctcaaaatgaggggcgcttttggcacccagacactgtggagatttgtacacacagccttttctgtacttgtctccactaggcttctctccacagaccatcccgggtggcatttgggacccagctggaggtgagtcatttctcctcaggaggctcctcagtgaggtttatttatttgtttctacacgaatagaggagcagtgatgagctgtctgttgggtggtttaaaggctgcgaggaaaggtgtgaagtagggtccccttgctcagcacgcaggagctgcctggcgccactgagcctgtgggtcccacggtctctcctcccctcttcctgtggctttgtggttcattaccactttaaccccagaaacctgagccgccagaggttattgggcattctctgggccacaggctgtgttgggggtcaggactgagagtagaaactttcttcctgaagcatctgtcttgagtatagtatggggagcctttaaaaaaccctaatgacagctgggcgcggtggctcacacctgtaatctcagtactttgggaggctgaggcgggcggatcaccaggtcaggagatcaagaccatcctggctaacacggtgaaaccccgtctctactaaaaatacaaaaaattaggcgggtgcggtggtgggcgcctgtagtcccagctactcaggaggctgaggcaggagaatggcttgaacccaggaggcggagcttgcagtgagctgagtttgcgccacagcactccagcccaggcgacagagcgagactcggtctcaaaaaaaaaaaaaaagccctaatgactgggtcccatttccatggttctgaggcaacaagcaaggtggagccttcaaggctccagacgaagctgactctggcggggtttggaaaactgctgaactgcacgagcatccatgggcagccatattttctatttagggctgccccatcttcttcttgttttcttcttttttttttagagatgaggtctcactatgttacccaggctggtttcaaactcctggcctcatgggattctccagcctcagtctcccaaagtgctgggattacaggtgtgagtccggcctgcccccatcttctttgtcttctgattttagctttcattctagtgcctccatgccctcaggtcatcctttagataccctgggctataagtgtgtaactgtcctctgctgggctgggaagaacgcaaaggaacaataaactgggtccctcccatgaattctaggttcaattcaggtcgcacttgctgtgcggccttgaacaagtcgctttccctctccgggcctctgtttcccctctgtacaattggaagagtggatgcattcttatacttcctctggtgctgctggtgtgtggtttcccccttactggtgatggcatactccaggaattctggaaaccctccctgatgccgaagcagggtcaccctctccccgcctccttgctagtccttactcctggcccagcgaggctcgtgatttttgtttaaaccattctgtggaattttagaattcttgatggaaaaatgatgagctgacaagaaaatgttttgaaatccagagcattccactcactgcctgttacggttaaggcccaggctttcgcttggatacttagcctcctcttgccttggggtttccgcagaaacactgttcccgtgcagggggagggagccgtgagggtgcctggtccacatccctgctgctgcaatgtgtactaaacccatacaggcaaatgaatatttatttgttatatattttttattgcaaaaaggtgcatagaaggaaattgaaatagtgcttatctctggtgatgtgtatctttccattttcttcttcctgtgtgcaaatatatagtattatgatatatactgtgttacacaataatcataaaaatatatttctttagaaagtttgaatcaaaatacatagaatttttcttgtcttgcattcttcatacagcattatgtcatgtcttcaatgtttttctaaaatatttttggccagacgtggtggcacacgcctgtagtcccagatacttgggaagctgagatgggaggatcactgaagcccagaagttaaagctacagtgagccatcatcatgccactgcactccagcctggcgacggagcgagaccctgtctcaaaaaatatataataattggccaggcacggtagctcatgcctgtaatcctagcactttgggaggccaaagcggatagatcacctgaggtcaggagttcaagaccagcctggccaatatggtgaaaccctgtctctactaaaaatacaaaaattagctgggtgtggtggtgggcgcctataatcccaactacttgggaggctgaggaagaagaatcgcttgaacccagtgggtggaggttgcagtgagccgagattatgnnnnnnnnnnnnnnnnnnnnnnnnnnnnnnnnnnnnnnnnnnnnnnnnnnnnnnnnnnnnnnnnnnnnnnnnnnnnnnnnnnnnnnnnnnnnnnnnnnnnnnnnnnnnnnnnnnnnnnnnnnnnnnnnnnnnnnnnnnnnnnnnnnnnnnnnnnnnnnnnnnnnnnnnnnnnnnnnnnnnnnnnnnnnnnnnnnnnnnnnnnnnnnnnnnnnnnnnnnnnnnnnnnnnnnnnnnnnnnnnnnnnnnnnnnnnnnnnnnnnnnnnnnnnnnnnnnnnnnnnnnnnnnnnnnnnnnnnnnnnnnnnnnnnnnnnnnnnnnnnnnnnnnnnnnnnnnnnnnnnnnnnnnnnnnnnnnnnnnnnnnnnnnnnnnnnnnnnnnnnnnnnnnnnnnnnnnnnnnnnnnnnnnnnnnnnnnnnnnnnnnnnnnnnnnnnnnnnnnnnnnnnnnnnnnnnnnnnnnnnnnnnnnnnnnnnnnnnnnnnnnnnnnnnnnnnnnnnnnnnnnnnnnnnnnnnnnnnnnnnnnnnnnnnnnnnnnnnnnnnnnnnnnnnnnnnnnnnnnnnnnnnnnnnnnnnnnnnnnnnnnnnnnnnnnnnnnnnnnnnnnnnnnnnnnnnnnnnnnnnnnnnnnnnnnnnnnnnnnnnnnnnnnnnnnnnnnnnnnnnnnnnnnnnnnnnnnnnnnnnnnnnnnnnnnnnnnnnnnnnnnnnnnnnnnnnnnnnnnnnnnnnnnnnnnnnnnnnnnnnnnnnnnnnnnnnnnnnnnnnnnnnnnnnnnnnnnnnnnnnnnnnnnnnnnnnnnnnnnnnnnnnnnnnnnnnnnnnnnnnnnnnnnnnnnnnnnnnnnnnnnnnnnnnnnnnnnnnnnnnnnnnnnnnnnnnnnnnnnnnnnnnnnnnnnnnnnnnnnnnnnnnnnnnnnnnnnnnnnnnnnnnnnnnnnnnnnnnnnnnnnnnnnnnnnnnnnnnnnnnnnnnnnnnnnnnnnnnnnnnnnnnnnnnnnnnnnnnnnnnnnnnnnnnnnnnnnnnnnnnnnnnnnnnnnnnnnnnnnnnnnnnnnnnnnnnnnnnnnnnnnnnnnnnnnnnnnnnnnnnnnnnnnnnnnnnnnnnnnnnnnnnnnnnnnnnnnnnnnnnnnnnnnnnnnnnnnnnnnnnnnnnnnnnnnnnnnnnnnnnnnnnnnnnnnnnnnnnnnnnnnnnnnnnnnnnnnnnnnnnnnnnnnnnnnnnnnnnnnnnnnnnnnnnnnnnnnnnnnnnnnnnnnnnnnnnnnnnnnnnnnnnnnnnnnnnnnnnnnnnnnnnnnnnnnnnnnnnnnnnnnnnnnnnnnnnnnnnnnnnnnnnnnnnnnnnnnnnnnnnnnnnnnnnnnnnnnnnnnnnnnnnnnnnnnnnnnnnnnnnnnnnnnnnnnnnnnnnnnnnnnnnnnnnnnnnnnnnnnnnnnnnnnnnnnnnnnnnnnnnnnnnnnnnnnnnnnnnnnnnnnnnnnnnnnnnnnnnnnnnnnnnnnnnnnnnnnnnnnnnnnnnnnnnnnnnnnnnnnnnnnnnnnnnnnnnnnnnnnnnnnnnnnnnnnnnnnnnnnnnnnnnnnnnnnnnnnnnnnnnnnnnnnnnnnnnnnnnnnnnnnnnnnnnnnnnnnnnnnnnnnnnnnnnnnnnnnnnnnnnnnnnnnnnnnnnnnnnnnnnnnnnnnnnnnnnnnnnnnnnnnnnnnnnnnnnnnnnnnnnnnnnnnnnnnnnnnnnnnnnnnnnnnnnnnnnnnnnnnnnnnnnnnnnnnnnnnnnnnnnnnnnnnnnnnnnnnnnnnnnnnnnnnnnnnnnnnnnnnnnnnnnnnnnnnnnnnnnnnnnnnnnnnnnnnnnnnnnnnnnnnnnnnnnnnnnnnnnnnnnnnnnnnnnnnnnnnnnnnnnnnnnnnnnnnnnnnnnnnnnnnnnnnnnnnnnnnnnnnnnnnnnnnnnnnnnnnnnnnnnnnnnnnnnnnnnnnnnnnnnnnnnnnnnnnnnnnnnnnnnnnnnnnnnnnnnnnnnnnnnnnnnnnnnnnnnnnnnnnnnnnnnnnnnnnnnnnnnnnnnnnnnnnnnnnnnnnnnnnnnnnnnnnnnnnnnnnnnnnnnnnnnnnnnnnnnnnnnnnnnnnnnnnnnnnnnnnnnnnnnnnnnnnnnnnnnnnnnnnnnnnnnnnnnnnnnnnnnnnnnnnnnnnnnnnnnnnnnnnnnnnnnnnnnnnnnnnnnnnnnnnnnnnnnnnnnnnnnnnnnnnnnnnnnnnnnnnnnnnnnnnnnnnnnnnnnnnnnnnnnnnnnnnnnnnnnnnnnnnnnnnnnnnnnnnnnnnnnnnnnnnnnnnnnnnnnnnnnnnnnnnnnnnnnnnnncggtagtacctgcatccttgcatcggacctgtaaggacaacagctgcttcagtgtatccactgagcatcttctctgtgcagctttaagcttttggtggagaggcaggtggaaagaaagccccacctttagcaggcatggtgtggatagaaaaaatgcaaataatagtattattgatttttccactgttatgaatgaaatggagaaaggaatgctttgggtggatcagggagggctctgaggaggaggtaactcctgaactggttctgaatgatggtgcaatctgcagaaacaggctgatggtgaggaatgtctcttttaggcacttactactaataaagacgatgataatattctcttcagagattctgcaaatgcgacaagcctcccaggtaaggactgggtattttcatattcccagggtccgagggacagaagatttgtctctgcagaaagtcctttcttatttggacatgtcgtcagaggatcaatcacagatcaatcgcagaaatgttctgtgtgtgtgtgtgtgtgtgtgtgtgtgtgtgtgtgtgtgtgtgtgtgtgttggagagagtcttgctcggttgcccaggctggagtgccgtggcatgatctcggctcaccacaacctctgtctcctgagttcaagcgattctcctgcctcagcctcccaagtagctgggattacaggcgcatgccaccatgcccagctaatttttgtatttttactagagacagggtttcactatgttggccaggctggtcttgaactcctgacgttgtgatccacccacctcggcctcccaaagtgctgacattacaggcatgagccaccgtgcctggccagaaatgttcttttattactttatatgttgaactttgatattgttagctaagatataatgaggagaccgtaagaaaagtgggacaaatcacttcgagatatttgaaaagtgagatatttcacagttggcccacaatacaaatgaatgtgctgcaaacaagattattggagtctgaaatggaatacctgttgagggaaatctttattttgggagcccttgatttcaatgcttttgattccctatccctgcaagaccaggaaagcttaccagtatttgaatcaagaaagatcacaagtcctgtgtttgactaggtatatgggacttatggaatccagactccagaggttcagtagttgagcagctcccctgatgactcttgggcttcgtgaggcagtccttgccctcgttccccatccctgggtggattcctgcctgcactgatgctggctgcctctgctacaacagcccaggtacaaagccctaccatggtgcagtgcacctgtggaggacctgctaaatacctggggctgagctctgcacagttggggactcggagaggattagagccatccctgttctcaaggaggctacagtccaggctctgacaaagagtaaattggtaactgtgacaaagaccagcatgtgagatgggccaaaagggaggcacagataaagcaaagtggaatttagagatttgaaagagtatatcaagctgagcagtcacagaaagctcatggaggaagtgccatttgaaatgggctttgaatggtatgggtgggatgcaagaggttgggtgttcaaaggttgctatgggccgggcgcggtggcttacgcctgtaatcccagcactttgggaggccgaggtaggagaatcacctgaggtcaggagttcaagactagcctggccaacatggtgaaaccccatctctactaaaaatacaaaaattagccaggcgtgatggcaggtgcctataatcccagctacttgggaggctgaggcaagagaatcacttgaacctgggaggcagaggttgcagtgagctgagatcgagccactgcactctagcctgggccacagagtgagattccatgtcaaaaaaacaaaacaacaacaacaaaaacaaaagctgctatggaggaggggaacctccagtcctcttcgtccaccctcactgatgattttttttcttttttttgagacggagtctcgtcaagcgattctcctgcctcagcctcccgagtagctgagattacaggcatgcaccaccacgcctggctaattttgtatttttagtagaaacggggtttctccatgttagtcaggctggactcgaactccccacctcaggtgatctgcctgcctcggtctcccaaagtgctgggattacaggtgtgagccaccgcgcctggccagcattctcaaatttaacatgtctaaaagagaacacctgacgcctccccacctattcaacccagatctgttcttctccatcttccctatctcagtaactggtaccgcatttgctcaggtgcgggggatcgggcaggcttcctccctactcctcatcctgtgtccagtccctcagcaagcgttgtccttgtgctttgagacgtatctaggaattgaccactcctcaccatctccagtgccaacacccagtccagcccctgccgcctctcatccagcagggcttcctgggctgccaactggtctaccaacttctagtcttaacccccaaccaactcttttccaaccagcacttagagtatcccttaaaacacaaatccaagctctctctggctcagtaccatctcccccagagtaaaagtcaaagtcttgacaaagtccccagtttctacgaggagtcccagcaaagccatgtggtcccctatctttagacgttgcctctccattctccctttcctcgctctgccccagccacactgccctccttgctcctccacacatgctctacctcagggcctttgcacttgctgtgtgctctgcctggacacgcttcctctgacattcactttgccagctccttcctattactcaagtctctgctcagatgcacccttctccgggaggcttttcctgataatttttttaaaaaacatttgtttggccgggcgcggtggctcacgcctgtaatcccagcactttgggagccgaggcaggtggatcacgaggtcaggagatcaggaccatcctggctaacacggtgaaaccccgtctctactaaaaatacaaaaaattagccgggtgtggtggcgggtgcctgtagtcccagctcctcgggaggctgaggcaggagaatagggtgaacccgggaggcggaggttgcagtgagccgagacagcgccactgagcaagactccgtctcaaaaaaaaaaaaaattcatttgtctgtctcccttgattggatgtaagatccatttagatacatgataggcactcaaagaatatttgttggatgaaagaaggaacaaatatatggccaggcgccgtggctcatgcctgtaatcccagcactttgggaggccgaggtgggcggatcacctaaggtcaggagttggagaccagcttgggcaacatggcaaaacctcatctctacaaaaaatacaaaaattagccgggcatggtggcatgtgcctattgtcccaggtacttgggaggctgaggtaggagaattgcttgaacccgggaggcggaggctgcagtgagcggagatcacaccactgcactccagcctgggtgacaagagcgagactccatttcaaaaaaaaagaaggaacaaatagaaaagatgatgaaatgttaataaatgagcaagccaagcatactgctttcattacacagctgcatctctcaagagacatgggacatgcttggagaaacttgtctttgcagccagcgcccgctcaccagtctgggctctctgcgctgcctgactctagtaggcatctgaagtgatggctggcaggcagcctcttcgtcagcagtggattgcattttgggtagaagagcctgaatgctgggtccatacaactgtgactgcattcccagcagaaggagatggttttgtttagatgtgccctctgtctagtccagggactctggcagtggtaggaagagcctttctgtgggaagacatggctgcttgcaaagctggtttgttctttccttcattcaaagaaatattttggcgatcctactttgtattcggcactgtgtaagctgctggcagtgttacagtgaaaaagacacatgtggtccctgccttcagagaactcagtctagaggtggaaatggagaaatactgggaggggcacttgctcagcttggagtggggtcaattctcaaaggaaatgacatcacctcatctgagatccaaaggccaagtagggactagaccacaaaagggtgcagcaaaggtagagaaaacagacaggagagaagagggaacgtgtgtggagagccctggaggaaaaagatcatggcttgttggagaactgaatgaagttcatatggctggggcttgagtaccaaatgcagggacaggcaagagatgacacccccatggagaaaactgcttccaaacacttgatttaaagcatccaatcctctctgacattgtcctcaaaggaactgccatcaaggaggtccccaaagccttccgtttgttgtaccctctttgtgccttgtgggagcaggtggaatgtcaccagaaaagccactctgaaagtgagtaggagtctgtggctagccacaggcgctcagaaaccctgagcttgaggtgtctctcttgccaagtggtggaatcctggaatctagagtgggctttgttaagaaacaaacaaacaaacaaacaaaaaacagttaagcttgtcaaatggcctgttggttggcagagctgtttcattttctgggaggggggttggaggggaaggttccctttgaggcttttgacagcaccagctaagtggttttcttctcctcctattcctttttctccatattctcctcttcctcctctatcttcaattttttttttaacctagtgcaagattcttcttcagtaccactgcccacattcctggttgctggagggagcctggccttcggaacgctcctctgcattgccattgttctgaggtgagatgggtcccaggggatggccctgtggtgttctcatatttcttatctagctttcctttgcccattctgaaatttatggtgcatttattcattcatttatccattcatcaaatgaatgcacacaccacaacacacacaacacctactattatgccaagccgtgttttaggtgctgcaggagacaatgctgggcaggacagatacagtctcaggaagaagtcagacacgaagaggtaatcactactgtggtaagagctacaaaaagcatgccatggtgaggagaactgacctggcattaaggaggaagaggaattggtctgagaaagaagagggttctttttttttgagtcagcatctcactctgtcacccaggctggagtgctgtggtgcaatctcgcctcacaggacaacctctgcctcctaggttcaagtgatcctcccacctcagcctctggaatagctgggactgcaggtgcacaccaccctgcctagctaatttttctattttttgttgagatgaggtttcatgttgcccaggctggtctcaaactcccagggtcaagtgatccgcctgccttggcctcccaatgtgttgggattacaggtgtgaactaccatgcccggcccaaagagggttcttaggagagaagcccagcatgtaatatggttgacagcgtgtgcatgcacgtgtctgtgaagggggcgcagcacggttggggcaatatggggcaggaagagtggacaggtaggctggcaccaggtcataaaaggccttgaaagaggtgggaggattttaggccttctcttgaggctaaggagtgtctgttggagtttttttctttttctttttctttctctttcttttcttttcttttttttttttttttgagacagagtcttgctctgtcgcccaggctggagtgcagtggtgcgatctcagctcactgcaaccccaccttctgggttcacaccattctcctgcctcagcctcctgagtagctgggaccacaggtgcccgctaccatgcccggctaatattttgtgtttttagtagagacagggtttcaccgtgtcagccaggatggtctcgatctcctgacctcgtgatccgcctgcctcagcctcccaaagtgctgggattacaggcgtgagccaccgcgcccagcctggggagttttaagannnnnnnnnnnnnnnnnnnnnnnnnnnnnnnnnnnnnnnnnnnnnnnnnnnnnnnnnnnnnnnnnnnnnnnnnnnnaaatttgctgggcatggtagtgcttgactgtaatcccagctactcgggaaactgaggcaggagaatcacttgaacctgggaagcggaggttgcagtgagccaagattgcgccactgcaatccagcctgggtgacagaatgagactcatctcaaacaaagaaaaccaaaaagtcactctcaatgcagtttggagactggatggggtgagtgaaaatggatgcagtagcccagggtctgggcaagagataataataaactgttttaggatggtggcaatgggttggagagccatgaatagattcttttttttttttttttgagatggagtttcgcttttgttgcccaggctggagtgcagtggtgcaatctcagctcactgcaacttccgcctcccgggttcaagcgattcttgtgcctcagcctcctgagtagctgggattgcaggtgaatgtcactacgcccggctaattttttgtattttcagtagaaatgggatttcatcatgttggccaggctggtcttgatctcctgacctcagatgatccgcccgcctccgcctcccaaagtgctgggattacaggcgtgagccactgcacccggcctcaagatatattttagaggtagaattgacaaggcttgacaacagattagatgaggaggatgaaggagagggaggagtccgggatgaccctcccatttctggcttcagcagttgggcagatgatactgtcattcactaagactggaaacacctgaggatagacaagtctcagtgaaaagtggtgattccactttgggacccacttgagtttgagatgccccgagaacctcaagcggacacgcttggcaggcaacacagatcgtcaccagcaagtagatggcaataagagtcattgggtgggggttggggatagggctgaaccctgtggggatccaaggtgaaaagttctgtagagaaggaagtgttgggaaaggggctgagaggaaccacaagattctggtgttgtaagaacgagagggagggagtgtgcattagacactgaagaaacacagtaggtgttggaattacaacatgaatatgacctttcctcccttccgagaaccacatactcaaatgatgaaaataccatgtgaaggtattttcatggtagctaacgcctgtaatcccaacactttgggaggccgaggcaggtggatcacttcatgtcaggagttcaagaccagcctgaccaacatggtgaaactccgtctctactaaaaacacaaaaattagctgggcatagtggcacatgcctgtaatctcagctacttgggaggctgaagcaggagaattgcttgaacccaggaggcagaggttgcagtgagccaagattgcaccactgcactccagcctggacaacagagcaagactccgtctcaaaaaaaaaaaaaaaaaaaaagaaaagaaaagaagaaagaaagtaacattggagaagcaccacacagttaaatccaaggcgcccaagcaggacctccttaggaatattccatgtatcaatccaggaacttaaaggtcacctttaaatgctctgccctagtgttcttttccagccatggttaggaaatactcattcaggctgagttgcaccctggctgctgtctcatcatgcccatttcatcccaatcatcttcgctccatttggtcattggttttgtcattcatttccaagtctgcagaaaagtcagccaatagtgccttcagtgaacaagcaataatgaaatttttcggtgttcacaattttactgcaggaaccggctttttttcataagctgaaaccctaaaagatgtcaggctgggtcttctaggcagtggttaatcgcgatgatctacaagtggaggagacattgcactctgtcctttctacatgtagagagctttctacacgttagctcatcagaccctgccagtagccctgacctagcttgactaccaagtgtggtgtgggttgaaagattagcaagatgactactcaaattgggttcagggttgttttcactttttttctttttctttttctttttcttttctttttttttttttttgagacggagtctcgctttgtcgcccaggctggagtgcagtggcgcgatcttggctcactgcaacctccgcctcccgggttcacgccattctcccgcctcagcctcccgagtaggtgggactacaggcgcccaccaccacgcctggctaattttttgtatttttttttagtagagacggggtttcaccgtgttagccaggatggtttcgatctcctgacctcgtgatccacccgccttggcctcccaaagtgctgggattacaggcgtgagccaccgtgcccggccttcactttgctttttcaatgaagtagattacaagccgtctgaagggtgcgtggaagataagattcttaatgagtagaggtagctccttggaggatgcaaagcctgttatattttttggccagtgaggggccatgtcagcatccacgggttcacctcctgcctaccaaaggattccttgcctcaccctaggtataccctcctgtgttctggctctgtgtctacgttagggcttcaacagacttttctcataacccaccacaggccctatagagtagagtagatatgatatacatttgacgggaggaaactgaagctaaaagagatggtgcgataacagctagtaagaataggccaggcgcggtggctcacgcctgtgatcccagcactttgggaggccaaggcaagtggatcacctgaggtcaggagttcgagaccagcctggccaacgtggagaaaccctgtctctactaaaaatacaaaaattagctgggcatggtggtgcacacctgtaatcccagctacttgggaggctgaggtaggagaatcgcttgaacccgggaggcagaggttgcagtgagcccgagatcgcgccactgcactccagcctgggcagcagaaggagactccatctcaaaaaaaaaaaaaagatgaagaagaaggccaagaatcaaaccaaaaactcctgctatttctatagggccttaagggtcatctagtcaaactctttcattttataaatgaggaaacagcccccaaaggtaaaatgacttgcccaaggacaagcaagaacacacaccctgagagtccctgcccatggtccccacctgctattggctaagagctgggcccagctggtcccattggcccaccactggcccttaacatgcagcaccatcttggtgtgttgtaatggctaatagaggagcattaggttgggaacagacctggtttgctattctgctgatgatgcttggacactggctggttgctaaacaaccagagtccctgcaggcacagacagggccagtgccctgtgctgagaacatgccaggaatttattttctagcctagtgagtttccattttcttctgtataaggcaaatttgtttggaaagaggccagttatttcaagtgatgaagaagccttctattccccaaatcccctctgtctagcaaagagtataaacttagaaatactgtggggctctgggctgccaaaatggctgaaccatggttaccatgggatggccacatttacagtaggtgaagtgtgagaggttgacttcatcctgccagtctatactatatttttttgtatggccctaaatctttttccagcaatatcagtgatttttttctttgttttttattactcattctttttttctgaatcatagatgattttttaaaatttaaatatgctatcgaaaaggcttgccatcttacaggggccaattcctcccaccctattctctgtcccccactgattctctgtattttaggttatcaggcactgggaaaatagaattctcctagtagagaattatttttctgcatatttatctagaatgagcttacatcattaagtgaggacttcctatgtgtatgcctatgacttaaacatcatttcgttttgaatgtagtgtatcattccggtattttaaaatcagagcttttgctacctccacagctgggggacgggcagagggactttcatggtgttccgggccatggaggtggctgggtgcagtgggcactgtctgtggcctttggggtaaaaggggtggcaacttggtttctacatatctttctaaaaaagagtgagagttttgagcattttaaaaaacttcttttagctacagaatcttttctttaaatgaaactttttgaagcccaaatatgtaaaatagataaaaggtggaggtcaaggtgcaaaagaaggcagcagagagctcatctgtttcttctttctgcccaccctgtgtcctctccagcccccaggccctgctcacacccatccaggccagctctggacaccctcaggttggctggtttcaaagtcctctttgagtttagtgattttcagaaaagaattcatactcgccttagaatatttcaaaaggaaagctcacgtttctttgttacccattcagttacttcgaaaaaaaactgaggacagagattgcttccatattaggtcaacagggacttgaaaaatatatacatacacacatacatatgtatgtgatatgtgattattactggtgatttgctaaataatgacaaatggaaaaaaatatatgtcatccaaagagagccactgttaattttcaaaatgtaaatgtgattgaagtctaacaaacatacagaaaagttcccacatcatgtgtacagcgccatgaagtgtacacacccatgtcattataatgagatgcacgtggcaagtcaagatgccaagacaccaggttgcagcagagaaagaggtttaatcagagggtcaccaaaggaggagatgggaggaaacctctgtagggtccagccgtacggagcttagcgggtgttctccccgtgtgtggagacgagagattgtaataaataaagacacaagacaaagagataaagagaaagcacctgggcctgcgggaccactactatcaagatacagagactggtagtggccccgaacgtctgggctcgctgatattttttgcatacaagacaaggaggcagggtaaggaaggtaaatcttctaagtgattgacaaggtgaagcaagtcatgtgattacaggatcgggggcccttcccttttaggtagctgaagcagagagcaggcagcatatgtcagggttttcttctctgcacttataagaaagatcaaagacttttaagactttcactatttcttctactgctatctactatgagcttcgaagaggaaccaggagtgcgggaggagcatgaaagtggacaaggagcatgacccttgaagcacagcaccacagggaggggtttaggcctctggatgactgcgggcaggcctggataatatccagccttccacaagaagctggtggaggacagtgttccctgactcctccaaggaaaggagactcccttttgccggtctgctaagtaacaggtgccttcccagacactggagttactgcttgaccaaggagcgctccagcggcccttatgccggcatgacagagggttcacctcttgccttctaggtcacttctcccaatgtcccttcagcacctgaccctatacccgccggttattcctaggttatattagtaatggaacaaagagtaatattaaaagctaatgattaataatgtttataataatgattgataattgttcatgatcatctctgtatctaatttgtattatgactattcttattctattttctttattatactgaaacagtttgtgccttcagtgtcttgcctcggcacctaggtaatcctctgcccacacctcaaatccatctccccaaggaatttggggctagggttgtaaaaatgttggactgggccaaagtgtggagatggttgactggttgcagggtgtagggtgaggtcctgggacaaggagatgaagaagctgtcttctcatgccaatcccgttcctctgtgagggtcttcaaactggttgccggaattaggggtccgtaaaacatcttaagtgatccttaaacaaaagtcttaggatcctaatgtcagaaatcctatctacagaaacaacggggatgcagatggtcagtgtctagggctacgtgactttttgcaataaggaaatgggccaaagtgcagcctgattactgcttcattataactattaatatatttctgtccagaacccagcatgcaatttttgtcaaccctgtggagatggttttacaatcaacacccagatcaagaacacttaatatttagacaaatctcctgagtctttttcctctgcctagtttcttgtttgtttttacacagccatgattattctgtatcctcagctctgcatcctgcctttcacacttagcactataacacaggcattctttcacattagtacaaattcttgtaaatctcagactttttttttttttttttgagacggagtttcattcttattgcccaggctggaatgcaatggtgcgatctcagctcactgcagcctccacctcctgggttcaagcagttctcctgcctcggtctcctgagtagctgggattacaggcgcctgctaccatgcctggctaatttttgtattttttaatagaggtggggtttcacaatgttggtcaggctggtctcgaactcctgacctcgttatctgcccgcctaggcctcccaaagtgctgggattacaggcgtgagccaccgtgcctggccataaatctcactttcattagctgtagtattaggtggatataccaatttctcttaatcaacctcctattactcctaattggtggcacccaaacattaccaattatttgggtgttattttgcttttatttaattaattaattaatttatttatttattgagacacatcactctgtcacccaggctggagtgcagtggcataatctcagcacactgcaacctctgcttcctgggttcaagcaattctcctgcgtcagcctcccaagtagctgggattacaggcatgcgccacgacacccggctaattcttttttagtagagacagggttttgccacattggccaggctggtcttgaactcctgacctcaagtaatccacccaccttggcctcccaaagtgctgggattacaggcatgagccaccacacccggccttattttgcttttataaaaaacactgtgttgaacatctttgtgcataaagggttttttttttttatagctatgttctttcttttcccagaagtagaattcctgggtcagagagtctgaattctttgaaatccagagtgtaatgattctctcctcagtcctttcttacaggagaactccattcaatgactcagcatagctccagtcagcagccctgctgggctctcttcctgtgtggtgtccacatggtgaagccctaaataatattctgcagattgtttatttcatttggataccaagctaaaagccagtggcagatttggagccaactattaattatttatcataacaaggacaggaataacctgtcgatataaaaagaaacccaaggaaaatccccaaatcttgtttttgacattggtttcccctcctctttcccagcccttcctggagtaactgatcttccatggaattgagggaggccaccttgttcccactttggggttaggaggcatgtcagtcacaaagtgggaagcaagagggaggggctgaggcttggggcactggccaccctggcacagttgaagggcccctttaggaaggggacgtgactgtgtttttgaagatccatgtcaccatttcatctttctttgagctgtcaagtgacttttctcagttactgagccctggctttgggcccagagtggagcactgtgaaccaagctgtgatcagaaagatgtctatctccttcctgtgtagcattgactttcctgtcagatgagtcaaattgtgcccagtggtgcccacagttgagtctgtgggaagtcaccagcatggtgggagtggaccgagaggcgtagggagaactggggaggtcagcaacattaggagcaagaggaacaggaaggcagttgagggagcagtgggacccttttcctgctattacatggcggttgcaaattatctgcctcctgccagccttactttgaccgagaggcccattttctttccctactaaaagaatgctttctttttttattttctttccttttcttttttttttttttgagacagagtttcactcttgttgccccaggctgaagtgcaatggcacgatctcagctcactgcaacctctgcctcccgtgttcaagcgattctcctgcctcagcctcccaagtagctgggattacaggtgcctgccannnnnnnnnnnnnnnnnnnnnnnnnnnnnnnnnnnnnnnnnnnnnnnnnnnnnnnnnnnnnnnnnnnnnnnnnnnnnnnnnnnnnnnnnnnnnnnnnnnnnnnnnnnnnnnnnnnnnnnnnnnnnnnnnnnnnnnnnnnnnnnnnnnnnnnnnnnnnnnnnnnnnnnnnnnnnnnnnnnnnnnnnnnnnnnnnnnnnnnnnnnnnnnnnnnnnnnnnnnnnnnnnnnnnnnnnnnnnnnnnnnnnnnnnnnnnnnnnnnnnnnnnnnnnnnnnnnnnnnnnnnnnnnnnnnnnnnnnnnnnnnnnnnnnnnnnnnnnnnnnnnnnnnnnnnnnnnnnnnnnnnnnnnnnnnnnnnnnnnnnnnnnnnnnnnnnnnnnnnnnnnnnnnnnnnnnnnnnnnnnnnnnnnnnnnnnnnnnnnnnnnnnnnnnnnnnnnnnnnnnnnnnnnnnnnnnnnnnnnnnnnnnnnnnnnnnnnnnnnnnnnnnnnnnnnnnnnnnnnnnnnnnnnnnnnnnnnnnnnnnnnnnnnnnnnnnnnnnnnnnnnnnnnnnnnnnnnnnnnnnnnnnnnnnnnnnnnnnnnnnnnnnnnnnnnnnnnnnnnnnnnnnnnnnnnnnnnnnnnnnnnnnnnnnnnnnnnnnnnnnnnnnnnnnnnnnnnnnnnnnnnnnnnnnnnnnnnnnnnnnnnnnnnnnnnnnnnnnnnnnnnnnnnnnnnnnnnnnnnnnnnnnnnnnnnnnnnnnnnnnnnnnnnnnnnnnnnnnnnnnnnnnntgtgtttgtgtgaaggttcaagaagacgtggaagctgcgggctctgaaggaaggcaagacaagcatgcatccgccgtactctttggggcagctggtcccggagaggcctcgacccaccccagtgcttgttcctctcatctccccaccggtgtcccccagcagcctggggtctgacaatacctcgagccacaaccgaccagatgccagggacccacggagcccttatgacatcagcaatacagactacttcttccccagatagctggctgggtggcaccagcagcctggaccctgtggatgacaaaacacaaacgggctcagcaaaagatgcttctcactgccatgccagcttatctcaggggtgtgcggcctttggcttcacggaagagccttgcggaaggttctacgccaggggaaaatcagcctgctccagctgttcagctggttgaggtttcaaacctccctttccaaatgcccagcttaaaggggttagagtgaacttgggccactgtgaagagaaccatatcaagactctttggacactcacacggacactcaaaagctgggcaggttggtgggggcctcggtgtggagaagcggctggcagcccacccctcaacacctctgcacaagctgcaccctcaggcaggtgggatggatttccagccaaagcctcctccagccgccatgctcctggcccactgcatcgtttcatcttccaactcaaactcttaaaacccaagtgccttagcaaattctgtttttctaggcctggggacggcttttacttaaaccgccaaggctgggggaagaagctctctcctccctttcttccctacagttgaaaaacagctgagggtgagtgggtgaataatacagtatctcagggcctggtcgttttcaacagaattataattagttcctcattagcattttgctaaatgtgaatgatgatcctaggcatttgctgaatacagaggcaactgcattggctttgggttgcaggacctcaggtgagaagcagaggaaggagaggagaggggcacagggtctctaccatcccctgtagagtgggagctgagtgggggatcacagcctctgaaaaccaatgttctctcttctccacctcccacaaaggagagctagcagcagggagggcttctgccatttctgagatcaaaacggttttactgcagctttgtttgttgtcagctgaacctgggtaactagggaagataatattaaggaagacaatgtgaaaagaaaaatgagcctggcaagaatgcgtttaaacttggtttttaaaaaactgctgactgttttctcttgagagggtggaatatccaatattcgctgtgtcagcatagaagtaacttacttaggtgtgggggaagcaccataactttgtttagcccaaaaccaagtcaagtgaaaaaggaggaagagaaaaaatattttcctgccaggcatggtggcccacgcacttcgggaggtcgaggcaggaggatcacttgagtccagaagtttgagatcagcctgggcaatgtgataaaaccccatctctacaaaaagcataaaaattagccaagtgtggtagagtgtgcctgaagtcccagatacttggggggctgaggtgggaggatctcttgagcctgggaggtcaaggctgcagtgagccgagattgcaccactgcactccagcctgggtgacagagcaagtgagaccctgtctcaaaaaaagaaaaagaaaaagaaaaaatattttccctattagagaagagattgtggtttcattctgtattttgtttttgtcttaaaaagtggaaaaatagcctgcctcttctctactctagggaaaaaccagcgtgtgactactcccccaggtggttatggagagggtgtccggtccctgtcccagtgccgagaaggaagcctcccacgactgcccggcagggtcctagaaattccccaccctgaaagccctgagctttctgctatcaaagaggttttaaaaaaatcccatttaaaaaaaatcccttacctcggtgccttcctctttttatttagttccttgagttgattcagctctgcaagaattgaagcaggactaaatgtctagttgtaacaccatgattaaccacttcagctgacttttctgtccgagctttgaaaattcagtggtgttagtggttacccagttagctctcaagttatcagggtattccagagtggggatatgatttaaatcagccgtgtaaccatggacccaaaatttaccagaccacaaaacttttctaatactctaccctcttagaaaaaccaccaccatcaccagacaggtgcgaaaggatgaaagtgaccatgttttgtttacggttttccaggtttaagctgttactgtcttcagtaagccgtgattttcattgctgggcttgtctgtagattttagaccctattgctgcttgaggcaactcatcttaggttggcaaaaaggcaggatggccgggcgcggtggctcacgcctgtaatcctagcactttgggaggccaaggtgggaggattgcttgagctcaggagtttgagaccaacctgggtaacatagtgagacaccatctctattatgaacaataacagttaagaaaaaaaaaggcaggcaggcggttatggtggttccctcccatcccaccacataaagtttctgagacttgagaacagcaaaatgctgttaaagggaaatattaagaatgagaatctgcagtaagggtgattctgtgcccacagttcttcaattctttataccgttttacccacatgtggtgttaccaaagccgggcagaaccatgctagcggaagatgtgaaatccagatagctcattattgccaagagctaggcagctttgatctccaaattgttattgctttcatttttattgtaatggaattgctttgttttgtttttttgtttttgtattgaagagggttgttttccctttatttttcataagctaatgtaaatgaagaaaaaatgtcttctctgggctgtaggcctggctcagcgtacacaggtatacatcctaagctctctatgttctctaatctgtggtgactgaacatgtgtctcaatgcacggggcatttctacctgtgtttctgcagcacccccactgccttgagtccccagcagtgctgttatttgcctaacacctgtagccatctgccacgcagccagacgtgaaacgctgagacagagaccatttaggttaaatacgacagcttatcctgctgggtggggaaagtaaaaaatatgctggttcaaggcctaaagtaaaatgatcaataatgtttgtagcattaatgaaatattttcaagaaatgtgtccaggggtagcactggctatgttgacgaggcctttggtaactcagagagctcttggccctgatggggacttgcccttacgctttctttatcaggctctgagttcacacggagcctctggcacttccctgctgtcttgggagaaaggaaactggttgccgcggcaggttgtggaatctgttgctggaaccaggctggaagcccacctggtagtgaacagggcccagtggggcaggctgggcatgttgtggtctatgggtttgtttcctggagaatgttcaggaatgtcttcccagctgctttggtgctgagctctattatctcacagcacgtccagaaggctaacccaggtggggaggatgctgacaccagctccaggtggagttggtggtcttaatttggagatgcaggggcaacctgtgaccctttgaggcaagagccctgcacccagctgtcccgtgcagccgtgggcaggggctgcacacggaggggcaggcgggccagttcagggtccgtgccaggccctcctcagtgccctgtgaaggcctcctgtcctccgtgcggctgggcaccagcaccagggagtttctatggcaaccttagtgattattaaggaacactgtcagttttatgaacatatgctcaaatgaaattctactttaggaggaaaggattggaacagcatgtcacaaggctgttaattaacagagagaccttattggatggagatcacatctgttaaatagaatacctcaactctacgttgttttcttggagataaataatagtttcaagtttttgtttgtttgttttacctaattacctgaaagcaaataccaaaggctgatgtctgtatatggggcaaagggtcagtatatttttcagtgttttttttctaccagctattttgcatttaaagtgaacattgtgtttggaataaatactcttaaaaaatacccttgaaatgtaattattgctttgggcatctgggtcatctaaaaaaaaaaggcttgcctgattcatgaggagaaaggagtgaggaaggggggataattaagtagaaccatttttgggggggtatccccttaatgcaggattaaaggaccgctcaaaagtaggtaagttcaaggaagaagcagcaatttctcagaaggctttaattatgacagtatttcccacacgagtcctgggatttctggaaggggtgtgtgggattttgccacgcttacatcacattaccaggtggtggacaggtggggaaggaaaaggaagggccattatttgtcagaagactgtttattggacctgggagggggtgtaacactatcacaaaggccaccctgaactcttgatcatcagatagaccaaatccatcccctactgaaaaggatcttaggtaggaaaaacttgggacacagccatccacatcttccaaacagaggaaaagccatcatgcggactctttgtgggtgagagctactgtgtaaacagttcagggatggggaggcgagaactgcagggaagcctggaaattatgtaactccactcaaagctggactgagaggcgccgcctctgggcccccacctgggcagtcagaggaaagccacaggacaggtgatggtggccgccatctccttcaggacaccatgctctcctctttgaggctggtccttgtcttgcagaaagtgacacagggaccagatgtcacccaggtggccaggctgcgtgggccatggagggggcacgggagtgggcactggagccaggacgtggagggagctgcctccctttcttcatggcattgctgttaggatgacatggttacggtgctctttccagaagaacttaggagagcagatggtgatttctgtagaggatggcaaggaatatgcagttactggagcagccttctaagaaagcattttccttatttactgaggcacagggcaaccaaacctttctgaatatctgtgagaattacagggcagaggcaggaaacagtgtttgccatcctccatcctccagtagcagaggtgtgctggcgaggtgaaaggccttttaaggccaggtgcggtggctcactcctataatcctagcactttgggaggctgaggtgggtggatcacttgaggtcaggagttcgagaccagcctggccaacatggcaaaaccccgtctctactaaaaatacaaaaattagctgcatgtggtggcgggcacctgtaatcccagctattctggaggctgaggcaggagaatcgcttgaacctgggagacagaggttgcagtgagatgagatcgtgccattgcactccagcctgggcaacagagccagactctgtctcaaaaataaaaaataaaaaaaatttgcctggcatggtggcggtcacctgtgattccagctactagggaggctgaggcaggaggactgcttgaacccgggaggcggaggtttcagtgagctgagatcacaccactgcactccagcctgggtgacaaagagtgagtgagactccatctcaaaaaaaaaaacacaaaaaaaaataaaagaaaggttcaaatgcagcactgctgtaagggctggggcgagagctcagagcaactccttaggcggagtggtgagcccgcgggccacagggtgaggggcctgttgcaccatctttcaaacactacccaatctctaatgtctttatggaagttcccatcttctgcaggtgtatgtcacttaaaaaacaaaacaggccaggcgcagtggctcattcctgtaatcccagcactttgagatgctgaggtgggaggattgctcgaggccataagttcaagaccagcctggtgcacatagcatgaccctatctctaaataagaaaaaataaaaatgagaaaagaggaagaagtacatttccctatatctacaaaaaagaaaaaaaattaaccaggtgtggtggcacctgcctgtagtcccagctactcaagagggtgaggcgggaggattgcttgagcccagagttcaaggttatagtgagccataattgtgctactgcgctccaccctgggtgacagcaagaccttgtctcaaaaaagaaagaaacaagcaaacaaaacaccactagttcagccatgtcctacttcatacccagtttttgatgacaatccacaacttgaataaagttaagtttttcagtactctctctctctctctctgtgtgtgtgtgtgtgtaagcattcacactacaggtgtatgcattattaaattaagggtgttctttcttctaacttcaaattgcttaataaagctgcccaatgtcctgaaaaaaaatagctcactgcatcatgggaagctgcattttgatatgtcagtatgattttttaaagaatgaaatgtatcaagaagccaggtacagtggctcacgcctgtaatcccagcactttgggaggccaaggcgggtggatcacttgaggtcaggagttcaagaccagcctggccaacatggtgaaaccccatctctactcaaaatacaaaaattagctgggcatggtggtgggcgcctgtagtcccagctactcaggaggctgaggcatgagaatcgcttgaacctgggaggtagaggttgcagtgagcactctgtctcaaaaaaaaaaattatcagaagagcaactttattctattttggtttttaaattagtgtgctgctctataagagtttttaaatgatggagagaggtacggcatggtagagtctgttaccagagatagatgaagagagaagtaaaaagcagaggaagccagcacctgcacgcaccactcacgcaggcagcgtgttttcctgcagaacataaatgcacctcagcatgtaatgcggccagcttgttagaaccccattcctggcttcaccctcagggattccagttcaataggtctgagctgggcccctagaaagctatataagctgcccagatggttctgatgaaggtggtgatccatcctgagagtggctggaccgtgagttccacaatgaggtggatgctgggggttcctcatacttccggacctggtgggcttcagtggatcccttctgtgggtgggcctgtgcatcagaaggaggccaggtgccaacctttgacccgggcaatcacagtagcatgagtgtaagttacacaggtgatgctgctgtacagccagctttgaagatctctgtgctggggaccgcagggctagaggtaagattcacagcaacatgtttcagtgggtgttaactagaaaacaaaaatctatggcagcaaagcagtacaccaactggccttactggttacctagaagttcacaggccctttgtggtagagatatctactaaaattacctaataataatggctactggctgggcgcagtggctcacacctgtaattccagcattttgggaggccaaggcagggggatggcttgaggccaggagttcaagacgagcctggacaacatagtgagacccatctctacaaaataatttttttttttgagatggagttctgctgttgttgccaaggctggagtgcaatggcacaatctcggctcaccacaacctctgcctcccgggttcaagcgattctcctgcctcagcctcccgagtagctgggattacaggcatgtgccaccatgctcggctaattttttgtatttttagtagagacggggtttctccgtgttggtcaggctggtctcaaactcccaaccttaggtgatccgcctgtctcagcctcccaaagtgctgggattacaggtgtgagccactgagcccagctctacaaaataatttttaaaaaaccaattaaccgagcatggtggtgcatgcctgtagtcccagctacctgggaggctgaagcaggagaatccctttagcccaggagttggaggctgcagtgagccgtgatagtaccactgtactccagcccgggcaacaggttgagacgctgtgtgttggggggacaggggtcgaaggggaagaaagaaaaaaaagaatggcagctgggcgctgtggctcatgcttgtaatcccggcactttgggaggctgaagtggatggattgcttgagcccaggagttcgagaccagtctggccaacatggcaaaaccctgtctctactaaaaatacaaaaaactagctgggcatgctggcacatgcctgtagtcgtagctcctcgggaggctgaggtgggaggatcacctgagcctgggagtgtgaggctgcagtgggctgtgatcacaccactgccttccaacctgggtgacgagtgagaccctgcctcaaaaaataaaaaaaaaaaaagtaaataacggctaccatttactgcctctccaccatgtgctttataaacaggatattcttccttaatgtggctgccatgtaagtattctcacctgtttacagatgaggcaactgaggcttatattgaagatggtggtccaagatgcccacgctagttaagaggctgaactagactccaaacctgggcctgctggactggaaggctggtgctctttgcttttgccatggggctccggcccccagccactggtgactacctcatgggcttctcttaccaagccctttctcaggccaggtgccctcaccctgtgtggggtggggcctgacccactcaccccgggaggagatggacctggtatcctcatgtggtttgtcacgtttatcagtgtgagctggggctggaggctgacccatgggagtctgagcgcacatacaaaggcatggcttgggggctcccataggtgatcctaaggcagtggcagccagagatgggtctcaaaggagaggggcaaaactagttcctgacatagttaactctctctgatcagggaccaaatcaagccacttcccctccatctatacctagccacacctctgcactgcatgaatggtttggttttttcctgttggttccttggtataaactttgatgaacttcctgaaaattctcannnnnnnnnnnnnnnnnnnnnnnnnnnnnnnnnnnnnnnnnnnnnnnnnnnnnnnnnnnnnnnnnnnnnnnnnnnnnnnnnnnnnnnnnnnnnnnnnnnnnnnnnnnnnnnnnnnnnnnnnnnnnnnnnnnnnnnnnnnnnnnnnnnnnnnnnnnnnnnnnnnnnnnnnnnnnnnnnnnnnnnnnnnnnnnnnnnnnnnnnnnnnnnnnnnnnnnnnnnnnnnnnnnnnnnnnnnnnnnnnnnnnnnnnnnnnnnnnnnnnnnnnnnnnnnnnnnnnnnnnnnnnnnnnnnnnnnnnnnnnnnnnnnnnnnnnnnnnnnnnnnnnnnnnnnnnnnnnnnnnnnnnnnnnnnnnnnnnnnnnnnnnnnnnnnnnnnnnnnnnnnnnnnnnnnnnnnnnnnnnnnnnnnnnnnnnnnnnnnnnnnnnnnnnnnnnnnnnnnnnnnnnnnnnnnnnnnnnnnnnnnnnnnnnnnnnnnnnnnnnnnnnnnnnnnnnnnnnnnnnnnnnnnnnnnnnnnnnnnnnnnnnnnnnnnnnnnnnnnnnnnnnnnnnnnnnnnnnnnnnnnnnnnnnnnnnnnnnnnnnnnnnnnnnnnnnnnnnnnnnnnnnnnnnnnnnnnnnnnnnnnnnnnnnnnnnnnnnnnnnnnnnnnnnnnnnnnnnnnnnnnnnnnnnnnnnnnnnnnnnnnnnnnnnnnnnnnnnnnnnnnnnnnnnnnnnnnnnnnnnnnnnnnnnnnnnnnnnnnnnnnnnnnnnnnnnnnnnnnnnnnnnnnnnnnnnnnnnnnnnnnnnnnnnnnnnnnnnnnnnnnnnnnnnnnnnnnnnnnnnnnnnnnnnnnnnnnnnnnnnnnnnnnnnnnnnnnnnnnnnnnnnnnnnnnnnnnnnnnnnnnnnnnnnnnnnnnnnnnnnnnnnnnnnnnnnnnnnnnnnnnnnnnnnnnnnnnnnnnnnnnnnnnnnnnnnnnnnnnnnnnnnnnnnnnnnnnnnnnnnnnnnnnnnnnnnnnnnnnnnnnnnnnnnnnnnnnnnnnnnnnnnnnnnnnnnnnnnnnnnnnnnnnnnnnnnnnnnnnnnnnnnnnnnnnnnnnnnnnnnnnnnnnnnnnnnnnnnnnnnnnnnnnnnnnnnnnnnnnnnnnnnnnnnnnnnnnnnnnnnnnnnnnnnnnnnnnnnnnnnnnnnnnnnnnnnnnnnnnnnnnnnnnnnnnnnnnnnnnnnnnnnnnnnnnnnnnnnnnnnnnnnnnnnnnnnnnnnnnnnnnnnnnnnnnnnnnnnnnnnnnnnnnnnnnnnnnnnnnnnnnnnnnnnnnnnnnnnnnnnnnnnnnnnnnnnnnnnnnnnnnnnnnnnnnnnnnnnnnnnnnnnnnnnnnnnnnnnnnnnnnnnnnnnnnnnnnnnnnnnnnnnnnnnnnnnnnnnnnnnnnnnnnnnnnnnnnnnnnnnnnnnnnnnnnnnnnnnnnnnnnnnnnnnnnnnnnnnnnnnnnnnnnnnnnnnnnnnnnnnnnnnnnnnnnnnnnnnnnnnnnnnnnnnnnnnnnnnnnnnnnnnnnnnnnnnnnnnnnnnnnnnnnnnnnnnnnnnnnnnnnnnnnnnnnnnnnnnnnnnnnnnnnnnnnnnnnnnnnncggtgcagtggctcacacctacaatccttgtactttgggaggctgagtcaggatgattgcttcagcccaggagttcgagatcagcctaagcaatatagtgagaccttgtcgctacaaaaattcaaaacattagccaggtatggtggcgcacacctgtggtcccagccacttgggaagttgaggtgggagaattgcttgagcccagaaggtcaaggttgtggtgagccatgataacaccatcgcactcctgcctgggaaacagagaagaccctgtctcaaaaataaagtaaaatcaggccgagcacggtggttcatgcctgtaatcccagcactttgggaggtcgaggcaggcagatcacaaggtcaggcgtttgagatcagcctggccaacatagtgaaaccccgtctctactaaaaatacaaaaattagccaggtgtggtggtgggcacctataatcccagctactcaggaggctgaggcttggacccgggaagcagaggttgcagtgagccacgattgcatcactgcactccagcctaggcgacagagtgagactctgtctcaaaaaaaaagtaaagcaatccaaaataatccataccgtctcagaaaaaaaaaaaagtagaataaagcaatctgaaataatccacaccttttttatcttttaagtaaaatatgtttcttgccaacaacatgctggttgatagcttgatcaacaaattggcttttatgtgctcatcaagtaataatttatctttccctcaatccaa

SEQ ID NO: 1238 - DNA, 3248 bp, Homo sapiens
tcaggtgcggcgctgtggcaggaagccaccccctcggtcggccggtgcgcggggctgttgcgccatccgctccggctttcgtaaccgcaccctgggacggcccagagacgctccagcgcgagttcctcaaatgttttcctgcgttgccaggaccgtccgccgctctgagtcatgtgcgagtgggaagtcgcactgacactgagccggaccagagggagaggagccgagcgcggcgcggggccgagggactcgcagtgtgtgtagagagccgggctcctgcggatgggggctgcccccggggcctgagcccgcctgcccgcccaccgccccgccccgcccctgccacccctgccgcccggttcccattagcctgtccgcctctgcgggaccatggagtggtagccgaggaggaagcatgctggccgtcggctgcgcgctgctggctgccctgctggccgcgccgggagcggcgctggccccaaggcgctgccctgcgcaggaggtggcgagaggcgtgctgaccagtctgccaggagacagcgtgactctgacctgcccgggggtagagccggaagacaatgccactgttcactgggtgctcaggaagccggctgcaggctcccaccccagcagatgggctggcatgggaaggaggctgctgctgaggtcggtgcagctccacgactctggaaactattcatgctaccgggccggccgcccagctgggactgtgcacttgctggtggatgttccccccgaggagccccagctctcctgcttccggaagagccccctcagcaatgttgtttgtgagtggggtcctcggagcaccccatccctgacgacaaaggctgtgctcttggtgaggaagtttcagaacagtccggccgaagacttccaggagccgtgccagtattcccaggagtcccagaagttctcctgccagttagcagtcccggagggagacagctctttctacatagtgtccatgtgcgtcgccagtagtgtcgggagcaagttcagcaaaactcaaacctttcagggttgtggaatcttgcagcctgatccgcctgccaacatcacagtcactgccgtggccagaaacccccgctggctcagtgtcacctggcaagacccccactcctggaactcatctttctacagactacggtttgagctcagatatcgggctgaacggtcaaagacattcacaacatggatggtcaaggacctccagcatcactgtgtcatccacgacgcctggagcggcctgaggcacgtggtgcagcttcgtgcccaggaggagttcgggcaaggcgagtggagcgagtggagcccggaggccatgggcacgccttggacagaggcacttactactaataaagacgatgataatattctcttcagagattctgcaaatgcgacaagcctcccagtgcaagattcttcttcagtaccactgcccacattcctggttgctggagggagcctggccttcggaacgctcctctgcattgccattgttctgaggttcaagaagacgtggaagctgcgggctctgaaggaaggcaagacaagcatgcatccgccgtactctttggggcagctggtcccggagaggcctcgacccaccccagtgcttgttcctctcatctccccaccggtgtcccccagcagcctggggtctgacaatacctcgagccacaaccgaccagatgccagggacccacggagcccttatgacatcagcaatacagactacttcttccccagatagctggctgggtggcaccagcagcctggaccctgtggatgacaaaacacaaacgggctcagcaaaagatgcttctcactgccatgccagcttatctcaggggtgtgcggcctttggcttcacggaagagccttgcggaaggttctacgccaggggaaaatcagcctgctccagctgttcagctggttgaggtttcaaacctccctttccaaatgcccagcttaaaggggttagagtgaacttgggccactgtgaagagaaccatatcaagactctttggacactcacacggacactcaaaagctgggcaggttggtgggggcctcggtgtggagaagcggctggcagcccacccctcaacacctctgcacaagctgcaccctcaggcaggtgggatggatttccagccaaagcctcctccagccgccatgctcctggcccactgcatcgtttcatcttccaactcaaactcttaaaacccaagtgccttagcaaattctgtttttctaggcctggggacggcttttacttaaaccgccaaggctgggggaagaagctctctcctccctttcttccctacagttgaaaaacagctgagggtgagtgggtgaataatacagtatctcagggcctggtcgttttcaacagaattataattagttcctcattagcattttgctaaatgtgaatgatgatcctaggcatttgctgaatacagaggcaactgcattggctttgggttgcaggacctcaggtgagaagcagaggaaggagaggagaggggcacagggtctctaccatcccctgtagagtgggagctgagtgggggatcacagcctctgaaaaccaatgttctctcttctccacctcccacaaaggagagctagcagcagggagggcttctgccatttctgagatcaaaacggttttactgcagctttgtttgttgtcagctgaacctgggtaactagggaagataatattaaggaagacaatgtgaaaagaaaaatgagcctggcaagaatgcgtttaaacttggtttttaaaaaactgctgactgttttctcttgagagggtggaatatccaatattcgctgtgtcagcatagaagtaacttacttaggtgtgggggaagcaccataactttgtttagcccaaaaccaagtcaagtgaaaaaggaggaagagaaaaaatattttcctgccaggcatggtggcccacgcacttcgggaggtcgaggcaggaggatcacttgagtccagaagtttgagatcagcctgggcaatgtgataaaaccccatctctacaaaaagcataaaaattagccaagtgtggtagagtgtgcctgaagtcccagatacttggggggctgaggtgggaggatctcttgagcctgggaggtcaaggctgcagtgagccgagattgcaccactgcactccagcctgggtgacagagcaagtgagaccctgtctc

SEQ ID NO: 1239 - protein, 453 aa, Homo sapiens
MLAVGCALLAALLAAPGAALAPRRCPAQEVARGVLTSLPGDSVTLTCPGVEPEDNATVHWVLRKPAAGSHPSRWAGMGRRLLLRSVQLHDSGNYSCYRAGRPAGTVHLLVDVPPEEPQLSCFRKSPLSNVVCEWGPRSTPSLTTKAVLLVRKFQNSPAEDFQEPCQYSQESQKFSCQLAVPEGDSSFYIVSMCVASSVGSKFSKTQTFQGCGILQPDPPANITVTAVARNPRWLSVTWQDPHSWNSSFYRLRFELRYRAERSKTFTTWMVKDLQHHCVIHDAWSGLRHVVQLRAQEEFGQGEWSEWSPEAMGTPWTEALTTNKDDDNILFRDSANATSLPVQDSSSVPLPTFLVAGGSLAFGTLLCIAIVLRFKKTWKLRALKEGKTSMHPPYSLGQLVPERPRPTPVLVPLISPPVSPSSLGSDNTSSHNRPDARDPRSPYDISNTDYFFPR

SEQ ID NO: 1240 - DNA, 47971 bp, Mus musculus
  misc_feature (1)...(47971): n = A,T,C or G
cccaaagagaagggtctcatcaaaaaatgtttatggttttatagggtgcttttagttgagtgagaatgtgacagaagagtgttaaagcacaacaacaacaataaaacctatcacaggcaaaaaggaactatagtaagtaaaattttaccaggggatctctggccaataggattacaggaggctgtggtcaagctgagacaagctctggggccagcagtcttttgataaatatagaattctcactttccatttcccaaagggcttcagtcccacacaagacatccattttggtgtcttaggtgactcattttagggcttgaccaaactggtaagaccatgctcctggcttagcggtatctctcccatttctctgaggctttgcaaactgtctatttactcatcagctatgccaaccttttataagctgaagaatgaaagggctacctgggaaagtgactttatagaacaagaaaaaagatgtgtggagctggatcaaccactgtgtactaggtttaaatctatttctgtttattctaggtccccagaaagaggtagtaagaagtggtacgtgacattcagacaaggaaactcttgattttcctatgacacataggaaactatgtgtttcaggaaaggaaaaattggacatgaatccaagacattatttgtagtcttgcctaagtgcaagagttatgggctttttctagaacattattcataaaaagcaatatctaatcattacaaacactttggataaaatgcaataaaaagagaagccatgagtacacttggtgaaactgcagcttgagggttagccaacaacaggataaaagaaccagaagggaatgagatggggaaggcagaaggggaagaaagaacacaggagcacaggaggtgagagggaaaaggaaaattacatctctgtggttcaactagagagaggggagtgggggaagctttggcttagatatgtggtctaggtgcgatgatttcccaacagggtgtggaacacttcaaattaacaaaagaaaagtttgggaacattccaaaatatgtataaaagtcaaggacccactctgttcctggaggtatcccagggattccctggtccatagcattcacatctgaaccatactaaaagtaaaaacggtcatcgtactagaaagaaagcaacccagatttgagtgactgactgcctccccaactcaaaggttacaagaccctgtcccacttcaggctctgatcaaatgtgtgctttcaaatggaaggagtagaggggaactcgagcacaggcagtccctaattacccaccattttctatcactttatcaaggcaagatttctcagtaaggcactccacccaggttttccaatttgagccccccccccatgtggatgctatagctctgtaatacacaaatatcaagatatgcactcttactcatgtccagcccaccagtgcaccctgcattccatagctgaaagcacaatattggaaaggcaaagttagaccaggatgttttgttctcagtaaaaataattactgtgcaaaatgcactggtgtgatctgttgtggttcgcttgtttctccccaacttgtctgttcccaagtgaaaactggtgcccctgagcagctactgcagccaaccaagggtttactgggttgccctaaccatctggagataaattgattttttttacttcaaagccatgactgctgagcgcacatatttcctagaaattgaaagaagaaaacttagcccactttgaagagaaaaatgtcacttcctgattctgcctgcattcaaaaacatttctgtaggacatgggtgtctcctctcacctcccataattctccacacatccagtaaaatatgcaggccagattgcttacatgaaatactttatcagtgagttcataaagatctacttttcaaaaacaaaacaatacaaagatttctactaaatatacttgtgatcctagcactcaggtacctgaggcaggaggatgatgagtttgaggtcagcctaaactacaaaataaataagtgaatcctgcctttaaaataatataaataaatacatttaaagataaataaacaaggaacaatcctcagactctgagatttcaaaatatacttagctccgcccttgccaccttctcacttcctcctctctagaaaggacactgctatatccagactcgttctacagtagttatcaggcatccattctcaggggagtgtgatagtttctgtctgttctatttaaaagacactaagggagttgttgtaaaattagcaaaacagtgaacacagatattcatgagtgaatgacccaaaattggagttcacaaaatgctgacaagttgccaaatacataaagtgatcattggtaaccagaggaagaatcaggctacaaacctaaggagggaggtgtattgttaattggaagtaaaggtggagaatatcggagcagcaacttaaaatatgtacacacaaataacattatatggactgagcagattatatctctgtatttaggaagtgtgtgtgtgtgtgtgtgtgtgtgtgtgtgtgtgtgtgtgtgtgtgcatgcacatgagcatgagtgtgtctgtgtgtgtggtgtgtgtttaacaatcaaaggaaaaggccacagggttggaaagattttctagtgtttaaaagcacttgatgctcttgcagaggtcctggtttcaatttccagcagtcacttgttggtttatgaccatctgcaattccagtctgagtcaatctgatgcatcttctaacctcctcaggtaccagttatgtatgtagtgcaaagacatgggttcaggtaaaacacttatacacacaagtaataaaattaacacattaattttttaaagaagccatgcatttgaatgaaagctttaaaaaaattaggttaaaaaatgtgaactgcaagagatgcaaaaaagagcctctaattttgcaagaaggatactggtcttacaaaaaaatgagtcagaagaggttattaggtatggttagaataaaacaatgcatctgtagtaagggaagaattcagtagcatcagaggctgaaagtgagacttaaagggaggtaagagaaacctttcagatgatacagccaggatactgcaagcaacatcagacgctgacagatttcaatccagaaggggaagggagttgagaggcttactaagagttggtaatggattccttcttattgaactagtacagaagccaaaagggataacaacttttcccacaaaggatggtgcgtccgcatgagttccccatgtgtgcacacagcattctgaatcaacagttaggagtaccatcttgtgacagccacttctttaaatgagctttataccagcctgtccataaatgcaatgcaataaaggataatgtttgcctctcgcattgttaccttgatgatgagatgatgcttgcctcgctcgttgttaccttgatagtgtcctgcacatagactctccatgctcagtgatgattcctctccatgtaccatgacttatcatcatgggagaccctttcctcagctcagcacatgagtgcagtgtcaacagctttctgaaggacagtttcaaccatttgagttttccaaccctaccctggaagaggttggggcatgaatacatatttagtctcttccttctatacttggctttcccacttttatcgttaattctgtgtcactgaaaattaaagtatatttctttcttttttatggttttagcgctttattatagaaaaggagagagagagagagagagagagagagaagcaaagggcagccatgaccatgtggagagaggggggaagggaaaggaagaaggaagaagagaggtgagagtaagagagacaagagcttaggagagacaagagcagtatatctctattgatgcaagttctcactaaatactctagacttgccccaaactcagggtccacctgacattgtcttccaggtgctaagattgcaggcatgccctgtcagcacaggctgaaactatatttgttttttttaacatttcagtatttccacttgttaaggttggctgatatcctaattctccagaatggcatgctttcaacaatcctcagtcatttcaaaatgttatatatttcaaagtgtctttacagcaatcaaattgtgcatttctatttttgagttcctctgctctcatgagcaaaaagagtgatgagatctaatatgcttccttctttgccatgatgaccgggacacctgtagatatatctgtcatactcaaatacatttctcaatacattaaccttactctttccattcagatctctggctttatgttaatagtttccatgattacctgtaaatttattttaaattgtcttaaaactcccacatgcaatttaaaaataaaaatgtatgaattactgagagcatctttgtatttatcttcaaatttttctctacccaacctttttctcagatgctacattctttacaacagtcagccttcataatatacctaccacatagctcaaagaaaatctttttagatgaaagcatagattagcaagaaaagcattcacaaggattttataaaggaagcttcaacctttctctgttattcccccaagtcttcttgattattttgccttgatttcattttagtattctaaatcatgtatcagaaaagtctaaaaggatgataaactctataataaaagagtttaagactctatatgcagtaaaaaaattttagattgtataaactataatgtccttattgaagctactcatctctaccattatagaaacatccacagaaagtggataagcaaatgttcatgattatttcaataaaatattattgactaaaacaggagattgccagatttgaccatgggccatatttcagtgatcttgcttcaaatctatcactcttttactgtgtcctctgaataaatgtcgcattgtgactgaagtctaatgtccaagttcattggacaacattgaaggctcttgggttaaggggacaaacagtccctcctcaaaaggtagtttagctctgtgctttgttacttaaaacataccctatgtgagtttgttccctctcaaatataccacattaaaaaacaactttttattacacagtcttgaagtgtggacactatgcccctccttagaattgggaacaaaacacccatggaaggagttacagagacaaagtttggagctgagatgaaaggatggaccatgtagagactgccatatccagggatccaccccataatcagcatccaaacgctgacaccattgcataccctagcaagattttattgaaaggacccagatgtagctatctcttgtgagactatgccggggcctagcaaacccagaagtggatgctcacagtcagctaatggatggatcacagggctcccaatggaggagcaagagaaagtacccaaggagctaaagggaactgcaaccctataggtggaacaacattatgaactaaccagtaccccggagctcttgactctagctgcatatgtaacaatagatggcctaatcggccatcactggaaagagaggcccattggacacgtaaactttgtatgccccagtacaggggaatgccagggccaaaaagggggagtgggtgggtaggggagtgggggtggatgggtatgggggacttttggtatagcattggaaatgtaaatgagctaaatacctaataaaaaatggaaaaaaaaattcagtctactctataagatccataaaaaaaaaaaaacaactttttattacacagtcttaattcaagagaactatagatactaaatcttcttcattttattctagagatatctgcatcctcataaccaatagtaactttagattccacagttgtaactgagcttaaatagatggctcaaccaaagcaccagaaaaatagtgctcaaaccagcacttcccaacaacacgatgctagagactgcgatgctagagactgcgtgattcctcttcacttttcacatccacatagtacaacagtagtattctcatccaaggatatcttggatgctctttcttagtcattctaccactgtttgtcaaatgctcccaggatagtctgaagtacttttccaaacatgggtttcctgatgtcaacctgagtatctgcttcagtagccctttaaggtttttaagttaagtcttctagtgatgttaatgctgatggtgctgagtcagagaccatcccctaaaagctcctactttgtatgataaattcccaaagcccatactattaggaagtaatgaaaggtaggaaaactacagctgtgttgtctctatttcaaaatagattttactcatcaaaggatgagagattagcttggtttaatacactgtcaggtacaggaaccacatcttagcaactaatgttactttaaaggacaccaatggacaatctcactaggacatgctagagtggaaatatagtcaggtaaatataggaaatatagttctgctagtcaggtaagtaaggaagatagaaatataggaaaagtaaaggaggcagaaatccaccacacaattcttttgtgtacccagccctctagaactctcttgctccgtagccacaaagtcaagatgatcaatgactgagggttggtcatttatgggcctagatctaaatcatgcagataggatgcaaagatgaagagagcaagaacaaatggagtggctctgggactctagcatctcacaaggtaggcaaaattgacatgtgctcacacacttgtcaataagtagattcaggcaggtaattacatcactaggtgacgtggcctggaatctagagagtgtgttagtgggttgctatatagaggcaggttttactaaggagatggagccagatggcccctgttcagaaagatttgaaagacagacagaggcatagcaaggtaagagaaacattcaaggaagcctgaatgggttcagcatattttctgcaaagacatctggagaacagacagagggaagaagaagcctgtttctttcccttcccttgtgaaccaaatcatttcatttcgatctcaagaaaggggtgtgtgtgtgtgtgtgtgtgtgtgtgtgtgtgtgcactcgcgtacaagcacgcacccattgacttccagtgtcatccctcaagatccactgcccttgctttttgagatggagtctctcagtaatcctgaaactcgctgattaagctaggttaactggtcagcaaatctacctgtctttgtctccataacactgggattataagagcatgccactgcacccagcatttatatgtgggttttgaatagcacacttcggtcctcaggcttgatcactgagtgagttctcaaacccttcaggtcatgtcatctcagtgtctccatctccttccttgtgaaataaataatttgagctaaataatcacaagactccatatttcatgtatcatgtactgactctgggtcttataaagtgagcaatcagctaggctcagcctttctacctgaccttcctctgctccggccaagttctgctttttttttttttttttttaacatttcctgtgcagttttacctccaagaaggatttgaaaataactcagcaaggaacctgtaggatcctgccacatgcaccttgtgtggcttaggtagaaattgaaaagagcctgttatcacagggagttgactgctaggttgcctggaccagatcttgcaacacatgaaaagcatagaggaggtgaagacaacaggagtagggaatagggtgcctctgaaatttcactagcagaggatgcaaccacaaaagaagtgaagttgggcccacaaactgttagtgactgatctgaaaatctcaactgttcagaaggttctaagaacaaagggtgattttcccccttgtcagccctccctcctaggacaatgtacaatatgcaaaactgtaagtataagacaaacatttttttccactgcctcctcagccccatgggccttcaggaagacctgaactttaaacgaagcctttttatttttcaacacccacagcttccattcagcaatcagaagttttccacttcgatcaaaggggctaaacagagagggccaagggagcagccggttctcagcagctctgggcagattgccacccactccctgtccgtacctaccaaaggacaaggctttctccccaaatcaaacaagtgtacccccccaaaacactaacttgccttgccctatctaaaccagcaggacaagtggctaaggacaaatctgtcttccaaaccccaggctcagtttccttgacaaccagatggagacactgccctcgaagaagatactcaccagttcattcctcactacctatccctcctctgtggtttttcattttataaactcaccaaaaagggcctctagaccatctcctaagtctaagctgccttgcagaatgctcaaagagagatctacacagatccagaaagctaaataatctgagctgggctttggatccggcatttctttggggcttctgacatgtcctgtgacctgcagaggtagtgtatagtcaaaagagaaggtgctgtctacctcaagggaaatagcaagtgaggtttcagaaggccacatctggaggcagctctgaagcttttagagaatattctgaaagaaaggtcattcatagcaacagatacgatccagctctgtgtcccagaaatctatttattatatgaaattccagacatggcccagagggcaacttgggctgtttaacaggaattgttcaacaacagctgccaagtccattcccattcaggaagccctcttacatcatcctgtttgatcttccccatgactgcaaagcagactggggtgaaagcaggggctgcgttgacttattcaaggagcaatgctgagaagaggaaaggctaagatgcaacctgaggttttcagcctgtaaggaaagggtcccggcaggcttttggagccaggctggtttgcatataccaccaagttttaccattagattaacactggtagatttgattaagaatgcttttatgctgggtctcagttctctatgctgtgaagaagaaatactacttgcctctgaggctggtgacgagtgtgaagtcagcctctaagccaagttcccaagactgtacctgagccagaatgttcaattctagtaacctctgtccacaaactcatcacaaacacctggaacactatttgcacccccatacaacccacagacacttcacacactcgttccacagcactgagcctccccttcctgaccccctcactaatttcttcccctagtatgaactttagggcaagccagtttcatcggcaaatttaacagccctggagagcaccctgcaagagatagaggagctttggttcaacagcaaattatttccaaattcctcttctctcaccatgtctttgaaactatcctcaaatatcctactgccacaaccttgtctccaggtaggtaaatgcccaaacagtgggctcttctttcccagaaatgggtatgtttccagtttagagcatgctgtaattgttggacaaccccaacagtcattgtgctgctgacaaaggactgccatctccagggacccagcaaagagactaatctggaagcttcctgggccaccagcatggatcatgcagtgtgcagggtccccgcggcaaggcgttctgtggctgagcctaaaggaaacagaagtggttggtgtacactcacgcggaactgtctccttcctaccacccgctgacatcaaccatcgtctatctcgctacaatttctctgcactcagattaatcccaggcgatgaaaaatgaacctctcccccacccttgcagccacccttcgcctcacgcccccagagaagagtttctccatccggcaactggtgaaggcttttttccaagtcacatgatccaggatgcaggggaaaatccttcttggaacagagctgggtacagaaccgaatcagatgaggagagataaggtgtgatgtgggacagactatataaagcatggagccagggctgcaacaagcaggcagctgtggggctccttcccctgacccagccatgcaggtgcagcccggctcggtagccagcccctggagaagcacgaggccctggagaagcacaagtcgcagctacttctacctcagcaccaccgcactggtgtgccttgttgtggcagtggcgatcattctggtactggtagtccagaaaaaggtgagtaaacatcttttttctgcttttctttcctcatttataatgtgtgtcctctagaggaacagctctgggaagctaatgaatagtttaactaggagcaaaaaaaaaaaaaaaaaaaaaaaaaattttaaaaagtgaaaataagtaaaactatgcatatatagagagagattatatcagagaaaaggggaaaaactagaaatgaactttctgcactcagtgggaattttttaaaagaaatagaactggacatgagctcaaaaatttccagatgtactggagccaacagaagagctgctgaccttgagaagttaagattgaagcccagatgggtcacagcctcacagtatggagggaggaagcatagggagccctgatggcgagtgcgcatgtgggtatcacctctgtaaggcgctcatcctaattctaaggttatgtcctcaatccgtgctcccaggacttctgaggcctctcttttgccgagagtctgttgttgctattgtttgtttgtttgttgtggttgttttcttgcttgcttgcttgtttttagtgaggagctactttttaaagactgtgatatttgagagagagagagagagagagagagagagagagagagggagagagagagggagagggagagagagagagagagagagagagagagagagagagagagagagagaggccaagtcttcccagagctctgctatttcaatgttaaaacccacaaaagaaatcgaaagcttcctcacaagccactggctttgaagagttcagggtgttgaaaagtagcagtgtttttgtcacctgtaccctctgagatgcacacataatgtgcagggccacaccatcttgggaaatttcgtttgtttgaaatgggggtagggggagaaagtcaaaccgtagcttagaaaagtatccttgagagagaactcttacacactgtctggaaaggactgcgtggtcagctcacatgactcacaggcttggggtgagatccaggcatggtgatttggatactgtatgaataccactggtgcaacaccctgcccaagtgtgaactcacctaatttataattcttccaagttgccttggaccacagactctgcagcatactagttgctgaaagctagggccttacaagtatcagcaagtatggatattgaaataaagctttaaagctccttcctccttggcagtgtaagaagggagttattcacacttggcctgcagagctgatgggacacatcagttcatggatcgtttgcatcaggccaagaaggactcgcagacaaacctctgggcactttctcttctctccacattctctactttctgtcactctgattttccatacaccagatgtatattgttttgcagtaatggccaggcaagagagattagagtagcctgaagacatttgtcattcagaggacacaggcagaactgctgggtgtggggaagaagccaaggtggggaaggctgatggtggcactgtgcagaagcagctcccatccactgttgaaatgattcctcctgtgaaatctgcacaggcttctgccctgtttctgcagaggcacaaaatgaagcacagacaggggacagggcttacagtcaagcaccctgagcaagtggtacagtaggggctgcttagtggctcttggttgctctgtgagaatgctgttccctttgcttgccctgatggtggcagaaacattctcattcttctctcagagatttttcctcttgtgtctgttgatctgacttacctccgtgcctgggtatagaacggtgcacagtctgtgtgtaagctctagtatgctgtgatttttttttacgtgtcagatacttgctcacaagctagggctttccattttaatggctatgctattaagaatctaacgcttttcgcatatcgtttctagtacattatcaggcattaactgtggcaagaactggggaaaaatgagtcccctgggcctgggttattaagagtacatcccataggaaggcagatggggactgttacaaacaggtgaacttagcaactggagagactcagtaggaatctgtcaaagaacccaatgaaaagatccaaagagctcagactcgcattctagtattaaatatggaatgggcaatgaacacatggtgtcctccttgtaccacagggactgtgtggggaactgtgaggtttaccttactgccctatgtaggaccacctcgagaccacctgtgaagcagtagttccccagcagactgcaagaaaacatcactggaaactacagtatctggtcagagtgagaaatatgaataactttcaaggaatggaagagatgagaatagaggccccacctgcaccactgcagagatgagaaaagagatggagaagggagagttagccatgtcaggaaagtgagctgggatccttgagattttgctagaggaagaaatcgctatagtggagacaaaggggaaactgaggcatcaactcagtatttactgagtatctatttgtactgggcactgttatagacactgggtacgtaaacctaaccaaaaccttgaggcaaatccactccctgcccttgaattgtttatatagctttctagtgatgtctttgaaggcttctgagatagctacaattttgtttacatttaaaccaacaatatttattatgaaatacatttacgttgttcagcaaaactaaccaataaataagggtaaataaactagaagcccttcatgccttgtcctcccagaggtagcctgtctttgctgaggaagccactgtaaacagattcctgtgtgttctttgagaaagctgagtgtctacaaatacatagtgcacagatctcattattaagtccacctcattcacttggtgctttatcatagagatccatccatttctatatgtagaagtctgctttgtgccactgtagcatcctatctgattctcttgtgccgacgcctcgtgatttacctgtgccttgtaggacatttctgtctaggacgttttgccctttgtgcatatttacaaacaggtatgtgtaaacaaagacctagaaatgggaatagactgtgcatcttttcactcaaatgaatgttgtctatcagcattgatggtaacatcttgaggtagggaaagtctaccatcaagggaacagcttttcccagcactatgagaagaaagaaaagttgagtagctcaagcgcatacacacttttccatagcttaggaaagactgcagagtagtgatgaaagcaaaaggaagaaacacaatagagcttctcttaccacccccaggaaagaagaatccatgatgacactggtttcctaggccctttgctcacagagagctgttggcattataaggaagcctctgggccatcaaccgtagtcatgtcttcgcttcctaagccaggaggctgagcctacccaggcttaggaatgaacacaaacacagtccagagaggtatagcaagttctcaggttgtttgattttcaaatatcggacaccaattctagaaagagaaagcagctaagcctacctttctcgttcttttgtagggagaatgctggtaaggatagggtagggctgaggcgatttgggaggagccctgtttcttaaactcaggcaatcaaagtgaggtgaaatgccctgagtcgctttccttttcttaagggactccccgcatctggagttcattatttttaataatttgtttaaatatttaattttatttaattaagtgtttcaaaaaacaaaaaacaaaaaaacctgagatttctttcctaaggagcaagcactctgcagtgttttgaaggaaaggctcacgtccatgtgtgggacccactctgggaactctcccaacgtgagaaactaaagcctatgaaaccaagcttcaggcagaatactccagataggagaacgggccacctctgctgagggtggtgagcgtttgggggagtaactagaatgtaagctgaatctgagaaaatttagaaactgtcctttaattttttttttcaaaaacgatatgctaaaacccatataactatccactaaatctgtcaagaatctatcacattcatgctgcctctgtacatatatgaaagtaaggtatgggcagggtggcttcactcacccatattttgcaagagttcacggtaactcaacaatgttgcctagtaacatacaacacatacagtccatgttccatctccccatatcttctatggctgggttttttatcgttacttgggagatctaggctcatataccacctgctgtgtgatatctgcatatgtgttagtcgaaaacatttttttttttcaatttaatgagtagacctatctggttttgtgtctcatatctgtgatcctagctattctcaaaggtaaggcaagaagattacaaattcaaaacctgcctgggcaaacttagtgagaccctgtttcaaaataaaaaggtttaaagggctagggatgtagttcagtactggggtgcttgcctagcatagacaaggcttgagttcattctccaataccacaagaaaataaaattaaataaaataagaaagcaaaccaatacatggatagtcctgctaggttgttagaaaaagattagagtttgagagatggcttagtggttgagctgcttctaccatgcatgaagacctaaatctgcatgttcagaattcaggtgcacagcgataaatccattgttcctagacaaaataggatttagggacaggaaagtcacagagcctccttatctagctggtaggtagtgaacacagaagtaatcaaccaaaggacagacatgacagaagctaagaactgatatctgaggttgccctttgaccaccacatgtgaatacatacatacatatatatacatatgtgtgtatatatacatatatatacatatgtgtatatatattcactcagagccatgaacatgcttagacacacatacccacatacatgatacacacacacacacacacacacacacagagagagagagagagagagagagagagagagagagattaaaacttcccagcttccccccagagctacgagtcaaaccaacattttaataatcttcccagaataataaaatttgagaagccatgtgggaactgttacacctgcccttgattgttggttttgtggtattgactatgttataattctttagtagaacaatctacattctaggtctacctggggttatctatgcttgatattattatagcagctagggacaaatgtctggttatttatagttatatgtttagatacctcattaaggggacaactagcaacattttttcttgtcatgaatatgtaatctgtggtgtaacactctcaagacatgaatgtcttccactcagcagactggcatttcttgatgatccttatctctgaatactttattaccctgaggattatgatggagggttagtagatgctgtcatccttttgactcactaactatattcttctataaagatgagctctccattatgataatggcagaggtaggacccatcaagctagacaatgagtaaaggcatggcccagagaaagacaaattggattgtgagagttactagggtatgaacaatggtcagactacagagcaggccaagacataccaggaagtgagactaggtgaccacattcattgatagaggaggcccagagaacaaagtaccaactccatctttagagcaggaagagttcttaatctcacaacttcctgcagcaactttccaagactataagacctacttgcctattacaatacatcttgaagccagtcctactctaaaagtagctagtggatcagacatgatagcatggccaggagactaactacagtcagaatacctcagagcctatcctgaattcctgaatcagaatagcttttttcatgacatgttgcaagttggagaaacactggttattccactgttccaaatcccagacctgccaaaccaggagttcctaataaaaatactttccctaggggggtctcctatgactgccattcactctcccatttggtcttgggggaacatactgctgttttgtctgccttaatcgagagagtcaatgctatggagttattgatcttcataaacagtatggccaactttcttatctctgggatcttttgtaatgattaagtcatttctctgtgtttagacaactcttaattcttgaagtccacttaatgaccaatacaataaggcccagaaaggatttggttcccagagtaacctggattaagtgtttagttgtcttaccttagagatagtagagatctccatgtgctgtgacctaccttctaagacaatgaaaatcagaaaagaaacagatgtgaaattctccatagaatattccacactttagttgtcttggtaagtgttagtaatagaggacttagtttgaaaagcaaatacaggaacttacacacatttgttccatgccctccatttcattgctctaaaagcaaacagatctttcagcgaattaaaacaaactgaacacattataagggccagagcagttcctcttaaacagctactattttcaaacaatagctagtcatttacatgccatatcttgttatgtctgcaatagcccagagtaagaatcactggccaaagctctactcacagtaactaagggagagaaaaatacagttctaggctactgattggcttcttggagggttgggggggggggtcatttcacctggagggaaacagactgtgcatggtcattctttccattacacagaaagaactctagtactgttggaatgtccatcagatggcatagaagctgaaagaaaagagaaagtatacttaaggaaatgaagcagggtttggtaaccatggtgattgtttttccagagctactatggagatgagatgacagccttggggaagccatttgtttgcatctaggtcaagcctgtgtcctaccttactcaaagccaagcccttgagcaagatagttctcattttgcccagccaagatctcaaattccccaggcaaggtttattaaaacagtttacagacagcactcagcatagcgcctccggtctaaacaatctgacaaattctaacagtcgtcatcttgtctcataaatgtaagcagtcaccatgtcctaaggccttgcttctccatcctcaaataaaagagttgcttgagaatagggagaagagagcaatgaaatgcactgtccttggccaagtgaaaagttcactgaagaattttagtccagaattggccctagactctagtatcttggcatccttccttacaaaatcaacttgatggtctgtaagacatctaggtttgtctcttgctttgactatggaatcacatctgctatgagtagccagaggaagctgtagagactttgtgttcttcaacatagaaacagtcaaacttctgtcctgaattccctggactttaggtaaaagatgaagctacaggattccctgtcagtgcttttgccactggagaaatagaactctcagttgacaggcaaaaacaaggttttcccttctatgacaccatgccattacatacatttaggtcctcctcccagatacacatcttctatccttgatgatcaaaggttttctggaagtcaggggcatcaacatcacctgaggacttggagagataatggcaacccaagctctacccaaacctgctaaataaatttgcagcctgaggtcctcagcactaaagcttcagaaattctttctttactcactgtggtcctctcatggtgtgtgctacactcagtattctcattccatattgatttgtgtcttttcaatggctgttttaatgaaccaggcccatagcatatctttgaatgagtgactcaatgcacaccacagatgatccaagactgaacgagtgattctctagcatttctaccactgggatggctctgctggtgttgctcttctgctattcactctggtctctagtgtctaagaggatgtggggctcttggtactttcaaccatgttaggcttcatctaaaagacctttagttgtgtgtttgcacatcatgctaatcaaaagtcatgcttggcatcaagccagctgcttaatatgttttgaagcgctggctgttgtctcacaaaggcagcataaaggagaattttgtgatgtcaggttttcctaagaatcatatgggtagtcatgcaatcacagacgtaaagcactgttacacacattcagaactctaaggaaataaggcaacacaatcggaaaacaagcagaggggaaagtatcttccaaagcaacttcacatctcttccccctaaaaaactgagacccaaagttatagactttcttcagattagtgtgacaccaaagtttgtattcctgaggcctcttgagctgtattcctggcaagccacctcttggtctagagaagagacctactttgccgataacaatgtgtccacagaaggagaatgacagagctcttggggatataaattaaaatgatacatccagatagtcatcagctcttgcacataacactaagaaagtcagatataatttgttgttaactttcagctttggtagactttgggaaactatttttccatgaaaaattcatgaaaatgttcacccatttctagtgtatataattatatcagttaagtgcactagaggtgacttacttataccagtcaaaacataaatgtggcattccattcctttgtggaaagctacttatatgcctctctaggctgacatgtgaagatgtgagggacattggaaagctagtctctgaggaatctgttgggaaccagtgcccctccatctctgtgggccactttcacagaataagctaactacgtttctctttagtcccctctgacagtttcctcttcaacagacaatgtttccattaacctctcattcatttacataaaatctatgcagacatttatgattattatagaactcatttgtaatattgtgtggatgtatttacaaatacacctctgtttgtgctacatatttatgaatatttgcaaatctatctggccataagcctgggataaatccacgagatcagagacccagtttacttatatcatcccaatgtttggaatataaacattaataaaaacatcacaatttccaaccacaagcgaggtagaaagttatcttccaggtatgcttacaacacttttagatgaaccaaatatggaaagaagaaagtgtgtacatttattctgttcatttgatcatatgttgacttaaggggaaaaaacagtactgtgtgtggagaggaagaaagctcttgactgggaagtggaagttccaactgtggtactgagagctacaagctcgctgtgtgtcccgggacaagccttcctgtcctgtttcttgtatgtgagatgtagatggtaacccctatcttgtgtttctcataaacagatgggctggcatggatatgaagcccactatactcaaccaatgaatgagtattcaacctttaagggtcagagggtgggtgggttctaaattgcacagtgctttggggactcccagggtgaaaaggaagataagttgttttaatcagtgtcctcaccctgcccttctctcttcccttccaggactccactccaaatacaactgagaaggccccccttaaaggaggtaagagctcagatttaggaatgaatgtgtagtgaatcatgcagatgacaccacaaggtgtgatgcctgcttatcaaccggcaatgctgtgactgtccccaacaggagtgggacaggtggaagtggggctgattgagatgagctgatacttcggactcatctgggtagcccctgatcactgtgctaatccacacaaccctccctcctgccaggaacagtctcactaacaccattgctgtagccaagctgtggaccctgatggggtccttgtattttgagctggaagccctaaactgaacaaacttgcgtatgactcttgataccatttcgcacatggaagtctctgttacacatccattaaacacagatcactgtggttctagacgagccaatcagggacagctcataactgcttggcatgaaaactggtgtaaactattggtcaaataactggtcatagccaaaatacttaatgaagtttaagacctataaaaacagacttcttccctctacattaccagacacagaagctattaacatattggcctctactaatccctaaggggatatatgcagaggtcagttaacactgaagattaaactcaaggttatctgactagtttttttcatgactcagagaaggaaaaatcagagagatgaagtatcttgctttgatcatacaggctaaaccaaaaggtccttgactctgactcagtctttatattcgaaacatcagtctccaccttagctccactcacaattttcagagcccaggtaccaagcacagctgcctgagcacagaactggaagaagatggggcgggtagatagaccagggtagagatgctgggcacctttgggacaagagggtacaaaagaactgacacagctccttatagcagcaacacatttgaagtttcttcccttcaggacaatctactgaagacttagaatgtatgggcaaggagccctgggtagacaggcagccttctgaaccttttaagattgatgaataagctcaatattggccaaaaacacttagggccgagtatgtggtcttaattccctcactttgtgtagataaccagatatgcagtcaaagagagaggtaaagttagaagggcacagacactgcctacaaagatttagatagtaaatattctaggctttgcgtgccttggctgaatcagtcatgcagttaccatgattgagacagcctgaaaacacccaagtctgtgagcgtgactactatcccctgggcctcacttacagaataaacaatggttgggcttggcccatagactggaagagcagactcctgcggtacagggagtgtaggctttggaggtggacatcctcgctaacttgttgcatatgttcctgtggagctttgcaaggagcggcatgcagtgattaaacttaattcctccacctctccttccattgtcctgccaccaccccgacttagatttttctaggaaaaattggaagttttcatttggcaaggggcagtagccacctcccatagatataatgtctgtggtaaagatagccttgattcagtgtcaggaccccagccacactcactagctgttctttcttggttgtagagtgctccaaacattggtcaccaagtataaagctcttaactagtgggttacactgactagttacagtgctagttaactagcactgaccagagcctaggatgcagggctctgcacacatgctaagcacaggatatccttagatcacatgaaataaaagaaaacaaagaacaaagttgtcttcttgacagctgctacgttacacttaagatgaaaacactctttctgggaaagcatatcccactgtgctctggtgttagactgcccctcccatcacaggaagaaagtgacacagatgctaggttggctttgtcatgtattctgttttcatgatcataagaggcagaataaagcaaactttccatgttactccccggtttttcatttgagggaacaacttttgttcatgaaatcccaagtttgggaaactgtgggtttgaccacttcccagctccctcctcacctgtcccttgactaggaatatccgaacaagaactaacaccaacaccaacaccaaaataacctctgtctttaattcaggggttcgacaactagattctattcgtcaatgctgataatacgcctcactaggaatgttaaatttgccttaaagacttttccctacttcctttgggttggtctgaggatcagccttgagagttatcagtacggggtggagggatgggtgtattcccattgacattccgtttgcaggtaagtttctgagatccgggaagtcagggggacttgttaaaggctatacagaagacaaaagagtcctgcaaatatgagactccaaggtttcctctgttgcccctacttcagccagcaccctgctgtgcatggcccctaactcccacttttaatgtacatgcatacttaccttgactccacaaattgggggccctataataggatgagggagaaaaataacatctgaggccaaaacctggttcccacaccagcaggaactggtgtctctttaggaaaacttttctcccctctgaacatcactggactaaatatactaaattaattcaagttggagctagaaagaatgcttcttttacaagcctgtaggcaggtaaatgcttgctatgcagcatgaaagcctgagtcacatccccatcacccacataaaaagcaggagcagttgtatataccaataatacaagcattgagaacacagaaacaggaaggtctctgagtctcactggccaggcagcctacccaaactggaaggctctgggatcagtaagaaaccttgtcttaagaaataagacagtagggccgggcggtggtggtacacgcctttaatcccagcacttgggaggcagaggcaggcggatttctgagttcgaggccagcctggtctacaaagtgagttccaggacagccagggcgatacagagaaaccctgcctcaaaaaaacaaaaaaacaaacaaacaaaaaaaaaaaccccaaaaaaaaaaacaagaaagaaagaaagaaagaaagaagggagggagggagggagggagggagggagggagggnnnnnnnnnnnnnnnnnnnnaaagaaagaaagaaagaaagaaagaaagaaagaaagaaagaaagaaagaaagaaagaaagaaaggaaggaaggaaggaaggaaggaagaaagaaaggaagaaagacagcaagcaattgaggaagacatactgtgttgacctctaacctcacatgtatgcacacatgaatatgtatgtgcacacacactagcagagctctttgacacttcctgagactagaattctcttgtcctatatagaaagagagaaagaaatagcctgacagttgtctgaagaaaatctgaagccacaatctctttcaccaacaaactaatcttaagccaacacaagaaacaaattgcccttttgggaaaggaaaagaagcaggcagggaaaaagagaacactgttgcaagacatcccaggcagggcagacctactttccagaagttcctgggaggaagtcccagggatggcatgaggtttgtcacaaggacagaagctgcaaggattgcagctaccatgacagctgttgtaaccaggaaaccagcactgaccagagcctaggatgcagggctctgcacacatgctaagcacaggatatccttagctacagggaaaccacagaaaaccacacccgtgttagtaatgagccctaacacaaacttgtcattcctggccagaataggacccagtcaatggctgacttgcactcggcccactgtgcttgaggcttgttagccattcagttgaattcatggacaaactggaaggctgggaggcaagcctgtcctgtatgcttcgtgctgggttttattctctcctctagcagacagaggtaacatgcctcctgcagagaaccaccatgaacatgaaatcaagccaaaaatacaccttcatgttcccacttggctggacctcagagcatccatctggtccactttgctcttccatcttccatgaaacagtctgcctcctccacatacagcttaaaaccaaggctcctgcatcctcttgtcatttcttgttttaatgttttgcttccagtgagttttgactctctagtgttgctcactactgggctcattcgtccaaatctcagattatagggctctttacctggatttcccaggagtttcaactactgccctgggtctgcttttccccctccagaccccaccaggcaccgttcctcacaaggctggactggtaggaatgaagcttagccaaggcaggtaggttagacaggatcttgtactgaatgagatcaggagaaacagccttctccagagacagttttcagtgaaacagctctctttattagggaagaacaagaactatctaacccttggggcatgggtaggggcttgcagggtgagtgttcatctttggctggggcacaagtgctggggaatgtttcatttgcataaagaggaatcccaggtgcttgtaggacatatccttataagggtgagatgaagtttaacctataatctggccagcaggctatgtgacaacctcaatggtggtggaggtggggggtcataaggcttacattgcctggccgtgcaagcccagagcaaggaggaagcagtcctactcctgcctgactcaagacaagattttcagggtttggacacaattcatcctcactcttgctctgaaccagctcccctggtcacacagctttccagccccatgcccaacaaaacctcaaatctttgtataccaatatctgcagaaggatgtaagatgtgcagaaatgctgtcaggacaaaatggtacagtactgtgcctcccagcaggtggtggaggcgtctggggttctcttttgtaaagctgaagatatttcagccactaggaacttctcaaaggctagcatactctgtcaccaagttctgggatggacagagagggccactggtgctttgggacaggcttgagagggtcatgtgacctggagtgattccatatcctgtcattagaaaaagttgttggtttgggttttttgtttctgtttttggttttggttttggtttttggttttgtttttttgttttgctttttttttaacttgtttattttgctttggtttttttcttgcaaatgcttatgtggcccatggtacccagaggtccttaatgtcctgaggatgttcataccgtccaaagctaaaagggaaaaatgggcatcaaaagaggtgaaatgaggcaggctatatgataaagaaatactgagtgtgagaaaaccgtacagccagggagactaatttctccccagtattttactgacccaaatggtctatgaccatttgtcatatagaagccacactgaaggcacaaggaatgacagtcttccttgtcctcacactcccttcccctcagaagaataaacactggctggcagagtcttactctgtcagtggaatggggctggatccagaatatccacgtctgcagttgttactcctgggttccatttttcttcgtcccctttgcagcatcatacgatgctttcccatggggataaattgcttttcagccggtcacatacttcacttgccacaaggaacctatttgttcctccagtcaatcttaacacactcaataaaacctgctcttaaacccactttcttttgctcaaggcagagataagaggaattaggaatctctctgtggaaaatacccaggaagtgagccattctgaatgatgtggaatggagtcctgcataggctatctagcattctaaagccacaactcctaattttcatacatacccaaaaaagaatgaggaggcaggagacaacatgaggtataggggagaggagagaacacaaagaaggtaaaaaggtttccatttgatgctagaattgccagatataattcccagtctccagctccagaggatatgccaacttgcctatcatcctgcactttaagaggatggaagaaggagggaaataaagggagaggaggggggaggagggaagaagggtagatagtactagacctcaaactggttcctttttatactctgttcaagccccagagacatctgtgtgccaggcaggtaacccaggccccagaccagagaaggggagccactatttggtattatttgtgtggtatgcaataggctcagtgttgtccattattccatttaatcctcttgcaagcggttaaggtggatgcgctcactttgaggaagaaggagcaactcggaaagtctcacatactcggggtaatccgtacaagcagtagggaaccagggtgggatttggactcacacgggtctcatatcctgagagcgcttctgtgcttccgcactgcaaatgagcggtggcacaggaaaggccatttagaatgttagaagagtcttacaatgtttcttaaacagccccaccaccaactgtcaggcccatcagtctttaacatgcattacctgcaatgaagtgccctagagtcagatgtgtttaccttactaccacaacaggtcagcacttccagctcccaaaagccttcacagtattgatgtggatcctaacttcattttaacccatttctgttcattgttttctctgtgttcaacaataagcatgctgtctattagggattttttttttcaaggaccgttgtgaatccagagtctcccttttacatatgacttctcttgagattcctgtctatatcataaatattcttggcctggtagcatcaaggaaatggttagatttgaaggaatgtctgtgaagtgaccctttgcacaatgcccgccaggttaagagttcccattgatcccaaattcggctgggaatgaagattcctctagatgtcgctgttgggactttccctgggtattcattctccagggaagaagaaactaaaacgtttcttctgtttcttcaaagattaagatatttccaagaggtcttcaccctcccctcccccacaaaatcagagagtctcaaacaattgtgtagagaactgagaaaacctactctcacaggcgatacagtgtttcatccctccccgccccaccccttcaaatcagagagcctcaaacaattgtgtccagaagtgggaaactctactctcacaggtaatacagtgtttcattttaatgagcatctcgttatctaatcctctctgtatggcatcacagagctatcccaagaaaacaagaaaaagagacaaaaagaaaagcgacctcacattctcagagtcacggctagccatgtgctgtgtctgttactagacatctgtaatcttaatgtgtgtcatattagctacgcatctctgttgagtgtcactgggtttacttcactggtacagtaaggagctgaagttctgggagaggaaatgacggatccaacaccttcactagaaccacatgttctctgagaagcaccatctgcccggtccttataggagtcgttctgaagaagttgactaggtcacaaatcatctgactcgaaagccccatttccctgacctgtgacttgacccgggcactctcccagactcaggatcaggaaggcaccctgaagctgctttcccagcaacgtcctccagctgtctcctgaggcttcagtcccgggtgtgtgtaatggctacagactcatctctcctccctttaaccctcactgctctagaatgatctagaaaggcatttctacatctcagtcaacaatgttccccatctaaataggaacgctaaaatctgaaagagaatattccagactcccaacatccaaacatcaactaagcctcttctctcagaataaacccctccagactcaggcactgaggagacagattgcagagatacagtctagatgctcagtccacaaatctctggagccacagcaagattcctactgcctggggcacctatacaagtcttcatatccacaatagactatcttatcatgggttcacaagctgatgagacttgagttgcatgactggtaccccacaaaatattgtctaggtcttagcaagatccctgtgactttcaaagcggccagcccactttttgaacagcactgactggccaaatattcaagctcccatctctgtgacttgggttataacttgggtgtccttcttatatgtctgccccggaaaccatgtgaggaaaaggagatcagagtggtgttagttgtcagctgagagcattttaagccttcagaagccactaagactcttggggtttgaaccccaccacgcatccttcactcttcttttgctgacacctccaaaagtgaagtaacagagatggcacccttctccaaggtcttcttccagctcaacagtgtcaatctctcaatacccagcccctccttgaaccaactccagcaatggcattcttagaaggagaagcctgtgcttagtcttaagcatgaaactatctaatcaattcttgaagaaaaactacagtatgcctgccatttgacttcaggaaatgcaaatgcttcaaaataaggtagactttttccatcattgggtttctcagaattacagctgaggtcaccccactgtacacatgaagaccaaaggggaaaaacagaagaaaaaaacgcctgcatgtgtgagagacaagcctgggcttgtacttctgccaccatctgtagatgctcagctctggcagatatcaccacaagccacctgatacagagggaccttaggactagagagatagagcctgtttttgatgtgacatcctggctttgatccagggcatgaatcctacttttccacctaacttagaatctgtgagagtcaggccaatattctccctgccaggggaaaaagcaagcactccttctcactacactgatgcccttagcactggtccagccagagctacagaaggaaataagagagatggtctagttgactccactcagcaaatgcatcttcttggctgatcagtaggagagactaaacagtagtctctgccaggatgtgttttaaaggacaactggcttgatagaggcagggcattccacttgacaggaaccagaggtatgcaggtggaagcatatccatgtagttgtgtactggagctgcacgtctccaaacttgtgtagagtggggggaaatccgtttgggcattagagtcacactgactgagttttgatctccaccctactagcaactagatgtgtggctgagaacaagccagttaaccctttcttattcatctatttatttatttatattccaactgctgcaccctcatcccattcctccctcacagagtccttcttcccatttcccctccccttctcctctaggaggatgctcccccactcctcacccatatatcccctcccaccctggaatatcaagtccctgcaggattaattatgcacatcctctcctgctgaggcaatacaaagcagtcctctgcttcatacttcatacggcatctgcatctgtttcagtcagctgccgggtagagcatctcagaggacagttatgctagactcctgtctgcaagcacaacatggcatccgtaatagtgtcagagattagtgtttacccaagggataggtctcaagttgggccgttattgtttggccatttcttcagtctctgctccatctttgcccaccctccagttaaacttttaaaacctatagtttctaatgtaaataacagagataactgtaaactatctctcatgggatgattgtaaaaattaaatctcttatgggatgcttgtaaaaaaatgtaaaaatgaaatcatggctgtagcatgctcagtaaaacattacagaaatagtcaacattagttatgatggtggtagtggtgatgacatttattactattaagacacagaataaaatgagggagggtatgggctgatactggagagattgggaggagtcaaaagcccatcagagctgtagggaacataaattagaaagtgattcacagcaaagagagtccgatttgcatctctctggtttcttttggttgatgttctacagtcccaaagatgagattggacaacagtcacacttccttagactattacactttgggatcaaatttctggttatacacatccacgagtatgtgcagggcagcaacaagcctcacaagaacactgcttagatgataattatgggctaagatctagagagtggaagctggccttcagcctttgatgggccagaagccccgtgtgagtccagaacagctagagatgaatactgcccctacttctgctgggggttcctctagtagtgagcttgctcagacagcagagggaacccttcactcagcttctagctgttctcggggccccagggtctttctcgaatgaatctggacaataagataaaggaagtaactggtagtacccatgtgtctctgtttagtttctgtttccaggatctgtccgttggtgagtcgggtgttgaagtctcccactattattgtgtgaggtgcaatgtgtgctttgagctttactaaagtttctttaatgaatgtggctgcccttgcgtttggagcatagatatttagaattgagagttcattttgtagatgaacttttggtagatttttacctttgatgagtatgaagtgccccttcttgtctttttagataactttgagttggaagtcaattttatttgatattagaatggctactccagcttgtttcttcagaccatttgcttgaaaattgctttccagccttttactctgaggtagtgtctgtctttatccccgaggtgggtttcctgtaagcagcaaaatgttgggtcctgtttgtgtagccagtttgttagtctatatctttttattgggtaattgagtcctttgatgttaagagaaatcaaagaaaagtaattggtgtttcctgcatggtactggtacagcgacagacaggtaggtagatcaatggaatagaattgaagacccagaaatgaacccacacacctatggtcacttgatctttgacaagggagctaaaaccatccagtggaaaaaagacagcattttcaacaattggtgctggcacaactggttgttatcatgtagaaggatgagaattaatccattcttatctccttgtacaaagctcaagtctaagtggatcaaagaactccacataaaaccacagacactgaaatttatagaggagaaagtggggaaaacccttaaagatatgggctcaggggaaaaaattcctaaacagaacagcaatggtctgtgctgtaagatcaagaatcgacaaatgggacctcataaaattgcaaagcttctgtagggcaaaagatactgtcaataagacaaaaaggccaccaacagattggaaaagaatttttaccaatcctaaatctgataggggactaatatccaatatatacaaagagctcaagaagctgaactccagagattcaaataatcccattataaaatggggctcagagctgaacaaagaattctcaactgaggaataccaaagggctgtgaagcactttaaaaatgttcagcatccttaattatcagggaaatgcaaatcaaaacaaccctgagattctacctcacaccagtcagaatggctaggatcgaaatttcaggtgacagcagatgctggtgaggatgtggagaaagaggaacactcctccattgttggtgggattgcaagctggtacaaccactctggaaatcagtctggcagttcctcagaaaactggacatagtactactggtagatccagcaatacctccccttgacatatacccagaagatgttccaaccggtaagaaggacacatgctccactatgttcatagcagccttatttataatagccagaagctggaaagaacccagatgtccctcaacagaggaatggatacagaaaatgtggtacatttagacaatggagtagtacttagctattaaaaaatgaatttatgaaattcttgggcaaatggatgtatctggaggatatcatcctgagtgaggtaacccaatcacaaaagaagtaacttgatatgcactcactgattagtggatattagcctagaaacctatcaaggaggaagaccaacgcatggatacttcattcctccctagaatagggaataaaatattcatggaaggagttgcagagacaaagtttggagctaagacgaaaggaaggaccatccagagactgcctcacccaggggccccatcccataatcagctaccaaacacagacattattgcatacgccagcaagattttgctgaagggaccctgatatagctgtctcctgtgagaccttgccagtgcctggcaaatatagaagtggatgttcacagtcatctataggatagaacacaggcctccaatataggagctagagaaagtatccaagagctgaaggggtctgcaaccctataggtgggacaaaaatatgaactagtcagtacccccagatcttgtgtctctagctgcatatgtatcagaagatggcctagttggccatcattaggaagagaggccccttggtctatcaaactttatatgtcccagtcaggggaatgccagggccaagaagtgggagtgattgggtgagggaacagggtgggggaagggtataggggacttttgggatagcatttgaaatgtaaatgaagtaaatatctaattaaaaaatgtggaggaaaaagaaagtaactgggagctcaggacatactactcagagacagtatgtaagctcggcagggcgtggctcctattgtatgagttaaaactgttagtttctgaaggatggactgagtggtcatctctggtgacatcatcaaaatatgtcaatgtcagattggagagtttccagttctccagatagggggaaccaaggcccaaagaagaggagatctgctccaaatacattgaatttgagtcactgcaggaaatgtataatttggttctttgcatacaaaatagcttgttataataagaaagagtgatcatcatcagtgatgatattaaacatatttttatttctctaatgctataatgacacaaatagcatgtttgtctctattaaagaagctccagatgggaggcttcctgctaagatgtcatcaatgttttgtcctcttaaaatttgaaggggatgtttttatctttgcagtctagatgaggcagatgtagggcatcctcacattcccatgtgctcactcaaccctgagtatgcccttgagtgtcttcagacataaaagttggccctgggttactctgagaaccaggttagctgatgctggtaaaagcagaggctagtttctgccaagcagaagatgctgggtagaaaaacctgcatcagtgttgctgttggagagactggtgttcaggctgaaggacatgggaggctcaatctcatttgacctatgggtggtgttcaataaaacctttcatgagaactctctagaacggtgtcccacactagatgatatttatcttctgtagtattctctaacagtcctagcagaaggaaactaaaactgtgaaaatcctaggctgtttaacagcaagatttgaaaacaagtttgagggattgttgttgtgattgttgttgttgttgttgttgttgtcgtcgtcatcatcatcatcatcagtggtgtgtgtgtgtgtgtgtgtgtgtgtgtgtgtgtgtgtgtgtgtggtgtttgtgcttaatttaacctcacaaacaggaacagacgagtaaatttcatctcagtgggtcacggaaaaagatgtagttgtttacagtccccaaagaagcaaacgacaacgcatacctgatcttcttttaggaaattgctcagaggatctcttctgtaccctgaaaagtactccatccaagaagtcatgggcctacctccaaggtcagtagccaaagctagagaatgatatcctcatgaggatgatgtcctatgccgacttccaatccagagtagagtcctctagttgaaagtgacatgtaaatgtgttcttagccaacatcatactttttataaattgaatttcaatgtcttagaggaagatgagagtttttttttttccaaagctacaaggctcttctctcaacccccatttgataggggaaaaagaagttggttagaaatggcacggttatcatatgccccagtacaggggaatgccggggccaggaaaagggagtgggtgggttggggagcagggcagggggagggtataggggactttcgggataacatttgaaatgtaaatgaagaaaataattaaaaaaagaaagaaatggcacggttaaaaaaataaaaaccatgagctttgagggagctgcattagggcccacattggaagcagctatggacaggtgggcaggtgttcacaagctccctcggctgctgggaaacacttcattcactcctctaggtttcctatctgtactttaaagacatttttgtcccttgactgcatcatgtcctccttcctctactacccccactaccatgcatggacttattagtttgggccaaatgcagtcttttcccgaatgcaaagaaagaacgactccatctctacctctatgaaggtattcacaggggaactacaaaattgcctggtccccagactgacagcttaatgggcttcttggtgcagggcctgtttgcatattgcagtgtgcttcagggaagagtcttttgtaaatgaaacagtaagaggcacttagaacttgaaagaatgagccatggaagagatgggcaagattctccaaatagccattttgctcatttaaaggaaaaaaaaatcttcattttgcagttacattagttcttgcctttcaattgaactgcaacaaggattgaagagaaagcattgaatcaattaaaaccagtatgccaccttcccagttctgaaggcacctttaccagtcagtgctaaatttcatttgttaggactcagagacttggctttcacacaaacacttttgcttagaggctgtaattctctgcttttctataatcctacgtgctgggtccctcactgtgcacatgaggggcccatgcaaggatgtttgattgcactttaaagaaaagaggctttcaaaacttcagaccatgttaaaaggtgtatgttattttttatcagcacatattaattgcctgcaataataagtttaattgttgatattttttatgaatgaacataaccaacttttattttatcttaaatacaaagattaatagacatactcctgaaaaactcaatactgaaattgaatagtattgtatgtcacagctctgccaccacccacaatgcatattgaaacattaaatgctcgttcattaacaaataacacaatagcatgacctttgtgtaaaatacagcctaggtggatgtggtctgaaaaagcaaggagctagggaaatggcataggcagtcaagtgactgactttcaagcatgaggctcagagctggggtactggaatctgctttttaaaagccaaacatggtccctcatgcttgcaatgccagtactgctaaggcaaaagtagggcgatccgtggagcacatcgactgaccagtttggcctactgggcaagattctggatggtgaaaatccctgtatcaaaaacacaagttatggagctggagagatggctcagcagttaagagtgttttctcttccagaagacccaaatttttttttcccaacattcacatcaagtgtctcaaaactgcctatagttccatctccagggtatccgatgccctcttctggcctctgtaggcacaacacacacacacacacacacacacacacacacacatacacacacacgctgaatatactcatagagacaaacacacatacacataaacaaaaataaacctttatttaaaaaaaaaacagaaacaaggtagatggtaccagtactgtgcatactggtacggtataaaggctgatatccaaggctgtcttctgggttaaacatgcacatgtacacagacaggtacacctgcacctgcacctgcacacatgcctggatctaacacatatagacatagaaacatacacactgaacaaagggtaaaaaaaaattaacaagtgtcaaatgatatgagataataataaaaagaaagtcatctataggagctgcctcccattagaaaattctctgtaaagtctttcgttttccaatacagtgttgtatgtgatccaaccctatagtctgagcattaaacaacgaaaggcagatggttttattcctgtgacttcctaagtatatataaaaaaaataagctataaaagaatattctagaaagggtacttcagaagatgtttaaatatttgggatggcaagtacccttctagaaaacagagatgctgagtgggaaccttgaaaaagaggtttccaagatgtacctaacatgtaagtaataattctatctttccagtgtcaaagcatctcaacaataccaaactgtcatggaacgaagatggcaccatccacggactcatataccaggacgggaacctgatagtccaattccctggcttgtacttcatcgtttgccaactgcagttcctcgtgcagtgctcaaatcattctgtggacctgacattgcagctcctcatcaattccaagatcaaaaagcagacgttggtaacagtgtgtgagtctggagttcagagtaagaacatctaccagaatctctctcagtttttgctgcattacttacaggtcaactctaccatatcagtcagggtggataatttccagtatgtggatacaaacactttccctcttgataatgtgctatccgtcttcttatatagtagctcagactgaatagttgttcttaacctttatgaaaatgctgtctaccatacagtacttcatctgtccaaacatgggccaaagaaaatattaggacaactcaaactaagcatgtgagttagtgcacttctctttctgtcctttggaaaaatacaaacccaggatttagaaagtggagtctccttcagatgcacaaacaggaaagaatgtgatatgtgcacagagacctacttgggcactagaaggggttgagttgtcccagtataaccactaattcactgaccttgagccatttttccttcccctggaacttggggtctgaatctggaaaagtaggagatgagatttacatttccccaatattttcttcaactcagaagacgagactgtggagctgagctccctacacagatgaaggcctcccatggcatgaggaaaatgatggtaccagtaatgtctgtctgactgtcatctcagcaagtcctaaggacttccatgctgccttgttgaaagatactctaacctcttgtaatgggcaaagtgatcctgtctctcactgaggggagtagctgctgccatctcctgagacatacatggagacattttctgcccaaattccattctgtgtgcagtttttaagtattcccccaaaagttcttgacaatgagaactttgaatgtgggaagagcttctggacagcaaacattaacagcttctcctgaccagagagaccatgcaagcttggtcttagacccatcaagcttgaggtttctacattgtgggagacagacttttgacaaaccatttgagttgatgtctgggcccctgggagttctccttcagtaaggagagcaagccgttctagtgctgtgtcagaggatggagtaaaatagacacttttctgaaggaaaggagaacaaagttccagaaaaaggctagaaaatgtttaaaaggaaaagaaaaaactcagcttttctcatatgagaggaacccagaaaaacaacactgaaaaagaagagtggctctgtcaacctcctcttaggtctcctcctctctagttattgggaaaggagttgcatggtacaggacaagttctggtgtgtggtcaaatagaatcagatgtggagaacaccatgcagagaataaggagacctgtcatatttgtgttgtactcaaatgaggggcaaatgaatcttaggctaaatcaaataacagtctctgtcaagctgtgctcagaaagtcaaccactgaagatggagggtgaggcacgtcatttaaaaaaagtgaaatgtagcaaaatgaaaacaaatacagacaatacttattaataagtcaactggagtgtaagtaggaagcagacagcccaggagtttgaaactaaactaatgatacttttaagggttaaccagcccctgtgggactttctagtacacctgtaataattatatttttcattgatatgacagaatacctggcagatacaactaaagaaaaatatttattttggctcatattttaaaaaaagatacagtccacaatgaccagaaggcaaggccataggaagatgggggtggggggtcacgttgagttcacggtcaagaagtagagagagatggactctggtatttatctttttctctttttcttcatttattcagtctgagattctagccaataagatagtgcttcccaccttcaagatggctctaccatccttagttgaatctctctagagacactagtacagaacaagctgggtgtatgtctcctagtagattccaaatcctgtgaacttgacagtgaagattaattatcaccacattcatggaagtaggcacatcattttttctaaccagatgcttaggctgcctgagactcatatttgcttagtgaaaattcagtgcatttcctcgtgaacttgaggaaaattgtgtgtaaaaagtttatgtataagttgatgaaatgttccacctctggagtgaggtcagttagccctggtggggttcctgttatgtagaaattcagggaacaccaatccctatccagtcctcaaggacttgcatccagccccctgattccagctctgctgttcctcatcaggcttctttggacatcccacagcctttgtgaaaagcttcaggtcacatctctccaggccacactgaagcggccccagcatccagggactccttggccctcctttgtgtacccctgccatttcgtctccatcttctatggatttggcccataactgagacacagaagagggatagagctataactttaggaccctcagaaccaaaggagtttgtgatcaatccaatactatttttagattaaaaataataaagcttattgtttaattttaacctatacatatatataggtgtacatgtatgtgtgtatatacacatatatgtgtatgtatatatttccagtcatgttttacatatctgcttagcctaggtcaggggatgaagcctgactcttgctttgggaattgcaaagcttgtatatgtttatatttatttttaattaagaagaaaatataatatttttcctaggcttcatcagcttatttaattattgttaatatttttccagatttccatctgcttcaactttttttaaatggagatagatcttagccacactcttccataccccactccctctccaagaagtcaaaactgctgtctggaagtctatgcctgccttccatttacataaatttacatttgttttctaataagaatgtataggacaattttgtgtgctttttatttttttaataaaagatatactttatataacatcttgtgacttccaatgttttatgtaatactaaagttttgaggtttacccagaccaaaaaaataaataaataaaaaacttcaatctagttctttcacttaaacatgagatgtttgttttgttgttttaatatatctctgcccattctcataaagacaaatattggattcacttccaaggtttcactgtcagtttaatgtattgataaaagagacttttctccttgtggagctcccacttcacatgttccccatagctgctggcttcatcatggccagtgagggcgtagacacccaataaccacgtttgaagaccagagcttagtcttaggaatctgaaatgtctttctgtctcttgtgagaactgctcttctctgtacacccagtcaacacttctgtcctgagctgcagttcacaacaagcctcatggtaggtaccagtgtgcaaccagttatggtgagtgaacttacaccatgcctttccaaaggattttggatcttttctagatttggtcccttttttctggagagtaattgaaaaactactggtcctaggtgcttttttccccccattttccccagtatcccatgggctgactatccacttttgtagattcatgtgacagttttcttccaattcctataaaaacgcatccctagcttgcttcagacttagatccagccatctgccttcaggagcctcctgagactctataatgaagactgacatgcaccagcttgtgcagcagttttgtccagaactatatcttttcaacccagaaaaaatatttcacatttgccaacaaggaccaagccaaaacaaaacaaatcaaaacaaaacaaaacaaaacaaaacttgtacttaccatctaaactatatgatactctcattagttatacagtgtattttgtaaacctctatcttagtatgaaatccaaacattgcaaagctaaaatatacttcccttaccctagtcgctaggactccagtgctattgagtctgagatgagcaggacttgggaatgtttgtccactcagtcagcaagcacaacactgaaaaggcacttgggttcactctgcagctatattgacacacgtttcagtgttcagttgctaacagaatacatcacggggagactgaaaagagctgaaagagcatcattctggcaatgtaatattgcccacagcagtggggcagcctcctaattgaattggttttctgtttatgatagcagtgttatggttctagaaaggcctgactcttggtggcctgattattgaagggatgactgctactgtggcatctcactgtaggtagaagttgcccataaaggctcaatctgtttttaaagtactatgatcaatctctagctggtctcagtaacgtgctaaaataaagtctgtcccctcttgtggattcctatcagacacagtctcaatatggtcagaccggctgcacttagctattgtcctcttctagcagtctttatgatccttcttctttcctaccttgaccattcctccagtatctaattccatccactaccagctcactcacgctattcaaatcccaattcacacccctagcagtctcactccttacaagccatctcctgacagcattaataattgagagtagaagcagtcatttatcaagctcttacatggttggcacttttcatatactcttttgtttcatccccaaatcagccttaggagataaacatcatcagacttatgcaaccagtaatgacacagagagtccaagccttgaggtagctgagccaacatcttacaggcagagtttaactaggaaactacatggctccctactttatgctggcccctccccctgctgcctttgttcaaatcacctttaattccttcccgttcctgcagccttccatatttccctgtcaccaggtgtgtgatttcttcattcccatggaaagctcactccacattttcctttccattgctctgctttccatttccatgtttctccctgatgggagtcttccagatcttctggtgtccccccatcctcagtgacacactctccactggagcctttggttctctcaatggacatctccactgacatccaaatcccagaaggcagcacttattcagcgcagctcctgagatatggctgactatttattgaatattttataatgaattttgaagaaagccatttagtgcccaagttcatcttatggaaagaacattgtctaggacgtcgggttaccacgtcaacagttaaaaataagcccaaaatattgaaatgtagcctgaatgtgatagttttcttacaaatgatttttagtactcaagaggatacctattattaggcattctattaggtatctattaaacaaagataacatgtgcagaagacaaaattcacccaggaatctgagaatttaaagggggaaaggccagtctcctttgcctttactggatgactcttataagcaaaccatactatgcattctactctgaggtatgcgtctgctccttctatcatattgattttagaaataattagtgagcatactaaccataagagttagattaacttttggtgtacttcagaatcacatgaaaggtggtggtggtggtggtaattgtgtggtggtggtggtggtggtggtggcgtcagtagcggtggcagttgttattattgttatagtatcattgtttgtattcctaaaatcccaggctacatacaatagcaattaaattataatctctgaggttagactgtaagcatcaggattatttttaagttctcaaactttaaactaaagtttaagagttaataatgggttttgaagggtagatgacagaagatttagggtgtggattaaccaagtctaagaattacaaaaaagttttatgaagacctgccccatatttgtaagtcaattacaaaatacgtttttaaaggctattaaacaaaggtggggaattctgctcctagaagacatgagttattaaataaaaatctcagggccagacataggatatctctctatgacctattggtcagggaggccccacagatctctaaaacaatgcaatctgttgtctaggcttccatcataactagatgataaggccctattaatgaagacaccacacactttgcagagaactcaatctcaaattaaccaggaacctccctttcatagtaccatacttgccactggaagagagaagacatcaatgatcttatctagaatgggttctgtaagctacaataccactcccagctaagatgtccacggatggaatgagttacagggataacaaactgttttctgatttagtttgggttttgctccacaggatggaagtcatatctgatgttgtaaacatagccagaagtgcatggccgggaagatcactgtccctagggaggatcagactattgttattttgctggagcaaactactttagccagcttctcaaactgccttttaaatatttatgttatgcccaaaggtcggtactacactcaacactggtcagagaaagtggtttttgcagtggccagcagtcattactggtctgaaaataagtgattatgaggacttaaccctaaatgagagcactataaactctcccccagtacttaacaaaaggggggggggcgggaaaaaaaagagctaaaggacagggagaatgctattttatagcgttctataaaatgttagcttctggatatggcatggctgttgtgcttatgacctcagtaactgtggttacctgcacaagatcaagccagtcaaaagtccaacatggatggaggaggggctcactaatccttccttctacctcaggacctattgtcacttgatagggaaagaagagtcatttttctttgagggcatagccactaataggttacccatacttcagtatatggtctcatgcccatatacacttgagtggcactaactggatgcaatgggatattgttatgccagggcctcttgggtgccacagaagaactctaagaattgccaacccactgtaatataacaaaagagcctttatttgaatcagacctagatagcaaaccttccccacaggttaagaatgcgatactggagtctagctaggggctggaagtttttatgcataagcagggatcctcagctttggggttacatgatggggaggtgacaagaaaaaccatccctcaaactcaatactgtttgttcagacagcaaggcagaattgtgcagctgggagaggactcctctgacctgagggctatcaggaactagtttttacaactggccacagctgtctgggaatacctaattgcccttctctcctggacaaaaagtggagtactgatctttgcaaggatgcttggttcatttttctcaaggacgggagccattaacactgggaagtgctagttatctaccagggaggatcccagcctcagagatacggaagttgggataagtattcccaaagctagtatctgccactcctctgaaagggaggggagtcattaaggagtgccaccatgaaaagggagattgcaatattctggtcccaggttggactcttcctgttgggagaggggagtggagctctgcttcagcagcaggaatgtacagagacaggcaggcttcctgcatctcttcatcacacccaaagagcttgggactctcctttctctctcttgtttggtgagatgatgattaaggcaatcactggactgagcacagggtcctcaatggaggagctagagaatggacccaaggagctgatggagtttgcaacctcacagaaggaacaacaatatgaaccaaccagtacccccagagctcccagggactaaaccaccaaccaaagagtacacacggagggactcaaggttccagccccatatgtagcagaggatagccttgtgggacatcattgagaagagatgtccttggtcctgtgaaggccccagtgtaggggaatcccagaacaggtaagtgagagtgggtgggttggtgagcagggggagagaggatgggatagggggtttttggaggggagatgaggaaaggggataacatttgaaatgttaatatagacagtatctaataataaaaaataaacttaaaaaataaaaacataaaataatccttggcatcatttaaagaatcagatggtatcttcctgggaatcaccctgatttatgaaatcactttgacttaaataaaaagtcaaaatgtgtgcttattcagtattgttaggggagggtttcatgaggctctgcccatagctgaggggctattggcaattgatagctgaggcgtgcctttttcttttgtgggtgcagctactggacccccacacatgcacagatttcccagtgcacctgcaggatacactaactgagctcagtgaacaggagatgaaggtgaatagagtatgatgcaagcaaggtacattgtatctgagtgtacaattggtaaggataaataaaagtatttttggataaaaaatttaaatgcatgctaaaataaatgagcaaagcttttaaagttaattgtttaaattttcaacattcaaattacgtcctgatgttggcatcacccagcaacttggagaaaaaggagcatctcttacagatatggaacaggacatggatttttgttaaggatcttgttaaagaaatatcccaaggtaccactctatctagagaacactggcttctctagtaaagatgatggcttagagtctactctatcccccattcctccagctctgtctacctttggaagtagcatatcctttcccttcctgcatctaggcaaatgtgacagcctacacattagagaacgcatcagtatataaacacaatgctttcattcattggaaattatcatccatttttaaactttgcccttttgctcactctctccgtgggactcttgggaaagagctgcgggctgggataagagtatgcccattgtggtgaaagctttggacaccatcaagatgctctggtgaggattgtcccttccctgtagtaaagaaaggagagaaaacatgtagagattaacaatgggaagagacagtcactacagcatcagcatgcttgagtgttaagtcctcgtaaaagaaattgctaaccttctgacctcagcaagtctcttggactctttgttcctctgctttaaaatgagaagaatcctttccaacgccaccaagtcaggatacgtactaagtttgaaaagtatgcagctgggggtattttattgtggacactttctctaaaagaccttggcttgtggagagcagagaaggagataacgaatcaatgcaggtttgaaagaaataaaggttcattatgcacaaaggtgtttccttctgcatcaggagaaaacagccattggctcactcagcaaagacctccatgaagcaaacactcaaagggtgagtatatctacaatccctacaaaatggagaactccttagggtcaggcttccacagaggcagaacaccaaggaccctctccttaagtctacgctgaggcagccccagacccgccgctgcagataagccccttgtccacatagaaatgaagcagaaattcatctctgaagcagcacgaaccaaggtgtctggcacaaacagaacttggaaatagaattgcaccatcagtagaatgagggaatgaccagcttgagttattgacgaatgtatctcggggcacacgaagctgaaggtcagtcctcctccaagagaacccagcctaagtaattcactattccattctcatggcttagaccacagatgacataactgtggtgaccttctgactctgcccttttctgactctctggtttccttttactagctgtccacatagagtcagcagaagctctggagtaaacaggaaaaaaaaatgcccatcccatcccaggatagacagttgcagctaagaaaccaacagccaaatgctgaaggaaactctgttcctgctgctgatgcatgttcacaaagacacagagctcaactgtgatctttccaggttcctctgatgtcattcatgatgtattgacttaatccattctatagcacgtaagcacgattgctgacgcttattgaatccaggcagtacgctaaaccttccagacactgtaggccatttcatgctcccaataatcacatgagattattggagaaacagaggttcaaagaaatgcaaaagcttgtccaagagtaagcagcttcttagctgaagaaccagttgtaaacattcaccatctggctcccgagtctcatctatcgtcagagagtggtgagcagccaggaggccacttgcctttgtgcaagcgtcatccataaggattttgccccacctctaccctttcagcttagttaacttgacctttttcacaaaattccatatcagatcttatttctcaggagccactatcaggctaagttagaccatgagacttaatggtctcaccaccagagtcattcactctctgcaccctatgtgtctgaccttgttctctgagaacaatatccaaatgcagaatgcattccctcccgtgtgtacaaagtaaaaccatccctccttctagttattctggcctgatcctcctcccattcacactctattgtgggctacagaaaaggacttgctcatttaagcctctgcagaaccttgagtcttgattctggtttctccacaaatggggtacctgttctctttgccactgacacttgggagtggaaaagtatgaattcaataataccattcaccctaagtcaaacccagtatggccaggaaatagctcacacccccatacagaatcatacagctctttctgtaattcggagtcttggcacaacttttctgggttccagacaggggaagaagtttggccacccccatcccaacgtgtgtactcatttcctgcccaggacaaaccacttcccttcatgagcgcctgtatcttgggtaaaaccccacccccacctccaggctgtcatcttgtgctgtgagcccaacctcacaatcatccagcactccggtattagtactttttccaaattgtatgtgattcatctgcatctaccatcattgtgatccca

SEQ ID NO: 1241 - DNA, 1768 bp, Mus musculus
caagtcacatgatccaggatgcaggggaaaatccttcttggaacagagctgggtacagaaccgaatcagatgaggagagataaggtgtgatgtgggacagactatataaagcatggagccagggctgcaacaagcaggcagctgtggggctccttcccctgacccagccatgcaggtgcagcccggctcggtagccagcccctggagaagcacgaggccctggagaagcacaagtcgcagctacttctacctcagcaccaccgcactggtgtgccttgttgtggcagtggcgatcattctggtactggtagtccagaaaaaggactccactccaaatacaactgagaaggccccccttaaaggaggaaattgctcagaggatctcttctgtaccctgaaaagtactccatccaagaagtcatgggcctacctccaagtgtcaaagcatctcaacaataccaaactgtcatggaacgaagatggcaccatccacggactcatataccaggacgggaacctgatagtccaattccctggcttgtacttcatcgtttgccaactgcagttcctcgtgcagtgctcaaatcattctgtggacctgacattgcagctcctcatcaattccaagatcaaaaagcagacgttggtaacagtgtgtgagtctggagttcagagtaagaacatctaccagaatctctctcagtttttgctgcattacttacaggtcaactctaccatatcagtcagggtggataatttccagtatgtggatacaaacactttccctcttgataatgtgctatccgtcttcttatatagtagctcagactgaatagttgttcttaacctttatgaaaatgctgtctaccatacagtacttcatctgtccaaacatgggccaaagaaaatattaggacaactcaaactaagcatgtgagttagtgcacttctctttctgtcctttggaaaaatacaaacccaggatttagaaagtggagtctccttcagatgcacaaacaggaaagaatgtgatatgtgcacagagacctacttgggcactagaaggggttgagttgtcccagtataaccactaattcactgaccttgagccatttttccttcccctggaacttggggtctgaatctggaaaagtaggagatgagatttacatttccccaatattttcttcaactcagaagacgagactgtggagctgagctccctacacagatgaaggcctcccatggcatgaggaaaatgatggtaccagtaatgtctgtctgactgtcatctcagcaagtcctaaggacttccatgctgccttgttgaaagatactctaacctcttgtaatgggcaaagtgatcctgtctctcactgaggggagtagctgctgccatctcctgagacatacatggagacattttctgcccaaattccattctgtgtgcagtttttaagtattcccccaaaagttcttgacaatgagaactttgaatgtgggaagagcttctggacagcaaacattaacagcttctcctgaccagagagaccatgcaagcttggtcttagacccatcaagcttgaggtttctacattgtgggagacagacttttgacaaaccatttgagttgatgtctgggcccctgggagttctccttcagtaaggagagcaagccgttctagtgctgtgtcagaggatggagtaaaatagacacttttctgaaggaaaggagaacaaagttccagaaaaaggctagaaaatgttt

SEQ ID NO: 1242 - protein, 240 aa, Mus musculus
SMEPGLQQAGSCGAPSPDPAMQVQPGSVASPWRSTRPWRSTSRSYFYLSTTALVCLVVAVAIILVLVVQKKDSTPNTTEKAPLKGGNCSEDLFCTLKSTPSKKSWAYLQVSKHLNNTKLSWNEDGTIHGLIYQDGNLIVQFPGLYFIVCQLQFLVQCSNHSVDLTLQLLINSKIKKQTLVTVCESGVQSKNIYQNLSQFLLHYLQVNSTISVRVDNFQYVDTNTFPLDNVLSVFLYSSSD

SEQ ID NO: 1243 - DNA, 47756 bp, Homo sapiens
gctcacccctggccaggtgtggtggcttacatttgtaatactagcactttgggaggccaaggcaggaggattgctttagcctaggtgttcaagaccagactgggcaatatagcgagacttccactctacaaaaatttatttttaattagccaggcatagtggcacatgcctgcaatcctagctacttagggcactgagctggtatatgtaaagtttttgttttgttttgttactattattatattttattttcttgctataaagacataggtatacgtcaagttttaataaaatgcctttgctttctctttaggaaaatgactatggagtaaccttatagcactattccctggaagctattccccgataaaggtggaatggcattgttaatgaggaaaatgacatctgattgataaactgaggtgggaggatggcttgagccccggaggtcaaggctgcagtgagcagcatgcagtgatcatgccactgtactccagtctgggcaacagagcaagaccctacctcagaaaaaaaaaaaagaaaagaaaaatgaaagcaaaggctcagatcctttcaacaaatgtaaattaagtgcccgctatgtattatacaaggagattcaggtgttttaaacacacaatatccatcctttaaccactctaaaagtgaaaatgattattatcacgctaccagtggaaacaactgagacttggggtgactgagtggcccccctaaaggctgcaagcacctaccttattgcagggcttcatagatgtttgttttggagtagaagaaagtggaaggggagttgaagccagatctgcatttcctagacacctctttgaactattcttcaaatattcagtcttctatagcttcactgaggacaaatttcccagagaaatttgctccactcagtctttccattttcaacaccttttgcatcccccacattgactatcccctctctggcccctctgcccataggcatcaagcaaacacccacacttgggcaattactgtcttccaatcctccctttctttgcacagctgaaagttcaatgttaagaaggcgaagtaattaaaagtataaaaagaaaaaaatcactgtaaaatgaattggtgctctatgctgtggttcacctgtttctcttttgcttgtcttttcacagctgaatatatgcaccactgtacagctaatgtacctgtccaatctgatatagcttactcaattgccctatccatgcagagatacattgatttttacttcaaaaccaacaccaccaagcttcctatttcatagaaattgaaaaaaaaaagaaaaagcccactttaaagagaaaaggtcacttcctgattttgctaacatcaggaaacaaagctttagatctttcagtacctgcctccgtccccaacaaagcctataaatctagcataaccagaggacagatgccttgactgattgtacatgtgaaaagtttgagtaactcagaaattagccattcttcttttcaaaaaatttcagatcttgaacttctaaaatgtactcagattcagatctctctctttctctctctttctttctttcttgaaatagcgtttgttcatccaaactttttgcacaccaattatgttccaggaaccattccaagaaggcaccagtcccctgagacatctatgtgcaacattttctatctacttctgtttcgaaaacatgtgtgagtacatgcacttagaggcaaaaggcagagtggggagagacagatatttggaggatggaagtcagcaagagggaaccagagaaaaagccaggcctgagctgagatctcttttctgggatggtcctgtgtttttggatctctgtaaaatgaaaaaaaaaaaaaaaaaaaaaaaaagccttaaaacaaatcgtgtttttcctgatattttgtatttaaaattactaggtaaatgtacagtttaaacatttattaggagcctgctaggcatgaacatgtacaaaccacatgctgtattctcaaggtgcttacactgcatttggggagaggcctacatagctacctagaatacaggtaatataattacatactggttacagcaactttctctggaatcaggcagacctgtgcaacaatgctttgagaagaaagaagggagagttgttcttgtctggagatgtagcccagtgatttatttggctagcttggagtctcacacttcaagtcaacataagaaaggctcacccctggccaggtgtggtggcttacatttgaaatactagcactttgggaggccaaggcaggaggattgctttagcctaggtgttcaagaccagactgggcaatatagcgagacttccactctacaaaaatttatttttaattagccaggcatagtggcacatgcctgcaatcctagctacttaggggactgagttggtatatgtaaagtttttgttttgttttgttactttctccgtcaattagtagcagtaaaaacttggaaaagccattttgccactccaagtctcagtttctttatctgccaaatgtgaataatagcattagtgggattattgtcaaactaagtgaaattatgagcatcatgtgcttagcacataaaatcgtaatatgagctcactaaaggtaggccgttgttgtgacggtaaaatagtaattagtactctcatcattattgattgcaggtagaagcataatatgaaaccctacagaggaaagaaggatttctttcttactggaagttgagggaggaagcacagaaatgaggcaatatatgagcagtaacttttttttttttaatgaaagatgtatgaaagggttttcgatgtcacaatgaggatgccgcctgcacaaaaatggagtcaggcactggggttggaataaagaagtgtgcctggagtcaagggagtggaatcagaggctgaaaacaaagctaaggggaaggccagggaggccttccaaggaaacatgaccaggattttgcaggcacggggagatgttgaaagattttaaactggaagaggaagggagtgaaatgaactagaaagagtttgggttggagccttactcgtcaagctagtgtagaggtagaagagttaacctcaatgaagtcccctagagaatgacagatcagcttaagatttccctactgtgtacacataacaccatgaattgtctgttattaatataaattaggttatataataattacttatttaacttcttgtcttacccaccttactgtaagtttcatgaaagcagagataatgtttgacttgctcattgttacatgggcagcacctagcacatattaagctctcaaatacccaatggatgtctcttcctttatccattattaatcgatatagaaggactttccccagctttgcaaagaatgcagactcatctctcttctttgaatgacaatggagttattaaggaccatgtaactaatagagttttctagccattcagctatactggaagcccccagaagccagaaaagtgatgttcttttttattttttatttccttgaatctcctacttccctagtattagtttatcattagtcctgcatcactaaaaatcataaaactacattaaaaaaaagtttcagtatttccacttggtaaaatctgccattatcctaattcattgcaatggcatgctttaaattcatagattacattcatctggtattttggaatatgttgcatatctcaaagcgctaatataaccagcaatatatccatttctccttttaagctcatctgctttttatgaccaaagagagttatgcaatccaatgtatctgcttcttttccctggttaccaggaagctcataaatatacatgttatgcttaactattaaaactgttatcagacaggatttcttaatacattcactttactctctacttttatatcttgactcctaccttttactttgtgttaatggcttcagtatatacctgtgcatttattttacattgtctcaaaacctttttaaggttgacaggaagatgatagatagggagatagatagatagatagatagatagatagatagatagatagatagatgatagatcaatagataaatatatgatttaaatacacacatatatatatcaccaatactggaagtatatctatctaactcccagatggcttctgtcccacctttctatcagctctgtcttcttcagtaatctatttttgtcatccaccaaccagaacacatagcttctctacaattagtgaattccaaaaagaatcttctcacatgaagcatgagttaacaatttagacattagggaagattttatagagttgcctttttttttgtaccaatttatgggccacatgtgaaattttgttacatgtgtataatgcacagtgatcaaatcatggtatttagggtgtccagctcctgagtaaagtatatttttgtttaaatatagtcatactactctactatcaatcagtgaatttattttttctatcctctgtatattcatacgctttaacccacttctctttgtcttcccactccccctgcactcacccttcccagtttatattcttcatctttctactctctacctccacgtgacccaattttttagctgccacttgtaaatgagaacatgtgatatttgtctttttgtgcctgcttatttcacttaagataatgatctctagtttaatccatgttgttgcaaatgacatgattttagtctttgttatggccaaatagtatttcattgtgcatatataccatattttctgtatccattcatctgtttatgaacacttaagttgattccacatctttgctattgtgaatagtgctgcagtaaacatatgagtgcaggtatctctttgatatactgattgttttcctctgggtagagacccagtagtgggattgctggatcaaatggtagttctattttcagctttatgaggactcttcgtatgatttttcatggtggctgtactggtttacattcctaccaatagggaattgagttcctttttctctgcatggaagtgtattaggaaatgcatttctgttctttttcccagatctctttcggttaccctgccttgagtctattttaatactctaaaccaagggtcagcaagctttctctgtaaaggtctaaatagcaaatattttagacttcggcagctgtgaggtctctgttgaaaccactcagatttgctgttgtagtggaattgaagccatagatgtatacacaaagggatataattacatttcaatacaacttcaattacaaaaataggtgcctgccagatttggcctatggttcagtttgctagccctgttccaaatcttcctcccactgcccctgtcctcactgggccctctcaatgaagtgtcactgtggctcgactccaacatccaatctcttcaagttagccccagcaagacaaagagctctaaagttaaagggacaggaccctccctcctcaaaaggccatttagttacatgtgttattgcttgaatataccctgggtgagtctgtccttgtctcacatatacccatagtttaaaaatatatattcctaccatgtacagtgatcatcaaaagataatcttaaatggataaaattattaagttacttttaatggcaaaaaccgcaatcacttttgcaccaatctaatgatttttaaatggagtaaaatgtctccattctattccaaatatatctgcattccagaaaggttctgaaggtatttctagagcctgcagccgtagtcaaggttagaaagagggctcaataaagggagcagaaaaactagtctgtaaaccaacatgacccagctacatggccccagacaataacttttattatgcctcagtttccctacctacacaatggaggtggtagtttacctgtccaaaggctaaattttggaccagatgatctcttggagattgtttccctaaatcagtgtttttcaaatggtctcaggcatctgcattccctggggtgctttgttaaaacagactaccagaccccagcctgagtttctgaattagagtaggtctagagggtcttaaagtggcaccaagttcccaggtgctactgctgccactgctggtgtgggcttacacctgaaggcctctagtctctacaacagagatctcccagtcccttatacaggaaagcaatgttggaggaatggctactgctggcttccctttacttttcaaaatggctttccttcttgaagggatgagacgttagttctatttgcccactgagtctcaggcactgcagccacatctcagcagccaattccaggctgaaaggaggctgggtggtcactctcatgaggccattctctggagaaagatagagacacggagtacagttgagaagagagaggcaagaatgccaccacacaattcctttacataagccactcttctagaactttctctttccataaacatgaagcatagattgaaggtcaaccctgcatatatgaccagcagcaagaaacgcaaggtgggatgcaaggacttagaagactaggaaagtgcagaccgccctcagggactctcatcttatgagcaaggcaacatttacatgtgtttacacacttgggttccacatcaagagaagtagataattagacaattaggttatgtggcatgaaaatagaggcattccagagagggtgttggtggacttgagagatctgggcaagcattcctggagatggtgaggcgggttggcaaaggctggaagggagaggaagaacaggagcagtggaaagccaagtaaaacacgagaggaagcctggatgcacctggaatattagcagagccgacatgagaatgagcagagagggccgggcaagcagagggggttgggtgcggtagctcatgcctgtaatcccagcactttgggaggccgagacaggcagattacgaggtcaggagttcaagaccagcctggccaacatggtgaaaccctatctctacaaaagattaaaaaaaaaaaaaaatagccaggcctaggggtgtgtgcctgtaatcccagcaactcaggaggctgaggcaggagaatcacttgaacctaggaggcagaggttgcagtgagccgagattgcgccattacactccaacctgggtgacagggcgagactcagtcaaaaaaaaaaaaaaaaaaaaaaaaggagagagaatgagcagaagggactcttacacctgtctctctccctgatggtatgtacttcctttagttgttcccatttctgtgtcccagtttcctccttttgtggaatgaaggattcaagccaaattttctgaagtttctaaattttattcaccttggagagaccccatgccagaaaagggcaaatgagcaggtgaagcttagcccttctctttgtcccacctgtgcttcagccaaagcagccctgttttcttatgtttttatattccttatacagctttgcttccagaaaggatttaaaacttactcaacaagaaattctataaaggctccttccatctgcacatcgtacagcttgagtagaagacagaaagaagccagttagcacaggtcatggatttctatgttggccaggctagattctagaacagctggaaagcagagaggggcttagagcaatgggggtgggaaatagggagccactgaaggtttgtgagtagaggagtgtcacagcaaaagaatgaattgagcccacaaactactgtactaggaactgatccgaaaatctcaactgctcagaaagttgagtaaaaacaaagggtgatttttcccccttgtcagccttccctcccaggacattgtattgtatgcaaaacgggtaactgtaagacaaacatttttttccactgcccttctcagccccacaggccttcaggaagacccgaacttcaagcaaagcctttttatttttcaacacccacagcttccattcaacaatcagaagttttccactttgatcaaagaggctgaacaagagggccaagggagcagctggttctcagcaactctgggcagaccacagagcccttgctacccactcactgtccgtgcccaccagaggacacagccttctccccaaatcagccaggtacatgccccagaaaacactggcttgcctcgttcccaccttaattaccggaccaaacgaacgtgaacacactgttttcaaaaccaaactcaattgggatcacgggggcctcggtttccttgattgtaaaatgggtatatcgccccccactctatttagcccaagaaaacaatttatctcttgatgtctctttcgtctccaggatctatgcttttacagactcactgggaggaaatatccagaccaaatcctaaagcctgatctaatttgggagatgctcagaagttttggttctatgcaagaacagcagtggtaataatccaagcttggctttagacacaggacgtttccttaggggcatctgggatctctgctggctcaaagtgatgcgctgcagacaaaaagtgagcagaaaggaaaggaggtgctatgcagaatgagcttcttccacggtgataccaaatggagctttcaaaggcccacatctggaggcagcagctatgcagtgattaacattttaaacggtattttgaaatggagatcattagtaaccacagatgtgatctgactctgtcccccaggtaatctgtctattgtatctaaattccagacttagcccagtagacagcttgggatgtttaacaggaattgtccaacaccatccccaaatctatttttattcatggagtactctgacatcatctcgcttggtcttcctgatgactgtaatgcagattgggaacagagaaagccataaagacttgtatgatggcccaaggctaagaagggaaagggctgagaccacacttcaggttttagctttcaggtgcagtgaagattgaatgacttagcacgagctttcagccaggcaggctgcaaagtgcacccaagttctttcagtgatcgacacttgcgacttaggttgagatagttttcatcctccctgagcctcagttttcccatctgtaaaaaataaacattgcctgcctcggagggtggaggtggaagtggaatgaagccacatgtaactcctagcgctgtgcctgagacagtagaggttcaattatagtagtcacatacacacacaacacatacatacacaagacacaacacaccacacacaacacatacatacacaccacacacaacacttacatacgcaccacactcggcatgcattgcagatcacaaatgcacaccacacacacactgcatacatataccatagagaacacacaacacctacacatacccccataccacaaatacacacacactacatagtacaccacgcagaacacacacagcccccatattccacaccacaccatctcactgccaattccttcccctcttcatgagttttacggcaggtccaggttcatctgccagtttaacagatcccaaaacttctgcaggagtgtttgttcaaaagattgatatttccagattcctgctttctgacagtatctttgaaccccaaatttcatactgccatgagccagtccccctttggagaaatatctccatttgtgtgccctttttcccccagggaacctgcagcatgtccctttttcagcagtagcctatcaaaccgaaccctttggagttattacactgcagtccgagggatccggcctccctgagacccagcaaggactcattatctggggaggtcttctgagccacaggcctcgctgaaagaaggtgcagcttcttgaacaggaaggcgttttgtggcagagtctaaacgaaacagaagttgctttgtgtgtgcgcacgcatgcacacacacacacacacacacacacatacacacacacagtcggggaaccgtcattttcctacgcgccctctgacatcagccaccttctctgtagctagtttctctgcacacaacttaatccctggcaatgaaaaatgaacctctcccccacccttgctgccgcctctcgcctcacgcccccagagaagagtttctccaccaggcagcaggtgaaggtttttttccaagtcacatgattcaggattcagggggagaatccttcttggaacagagatgggcccagaactgaatcagatgaagagagataaggtgtgatgtggggaagactatataaagaatggacccagggctgcagcaagcactcaacggaatggcccctcctggagacacagccatgcatgtgccggcgggctccgtggccagccacctggggaccacgagccgcagctatttctatttgaccacagccactctggctctgtgccttgtcttcacggtggccactattatggtgttggtcgttcagaggacggtaagtggactcctcttcctccctttccttttcttgttgttttcccgagagaaagagccctgggaacaaatgatattcgtttgttggttaagagcacaaaataaaattaaataaataaactctctctctctatatatatatatatactatagtatatactgtataacgtaatacacttatgttacataatatatattatattatacagtatatattatatatatatatatatatgagaaagggagaaaagaaagaggaacttaactctctaaaataatttggcttgttgagaaaaatattgttagaccatcatcttaaaactttgcagatctgtctgagcaaaacagtggaggggagctattggccttttaaagttaagatttaaatcttaatgagccagagacccatatcaaggaaggaagcaatagagaaacctgataacacatttgcacaagttgttatcatgtcttcaaggacttcagactggattctgaggttctatatcctaagtctgagtgtcctggaggtttctgaggcctcacccattgccaagagttttgtttttgcttttgttttatacaaggagctaagtttcagaggccaaggtctagaaggaaaggaggcgaaagagaagaccatggcttcttagagctttggacattttggtgttaaagccagcaagacaaatcgaaagcttcctcttaagccacaactttgaagaagttagggcgtcacaaaaaaaaaaaaaaaagaaacagcacatagaagcagaaagttgaaaggtttttagcacctgttctctctgatgttcctcacaatactaagcaatcgttgggtacacactgtacagggtcagactgtcttcggagatttactttgaagtaaatggtaagatttgtttctgaaaacagaagaggaggagaaagaggaagcttcttcatattttagaaaattggtgtttacagagaatctaccagtatatattatatagaaaatgctgtagtaatagcatatattgctcatgaattttttgatgaagttgttaatgggtaatttaagagctgcacccacccacatgacctgccaaagtgagaatatttctgtttcttacttcatagtgcctacttttcgtggtattataatcctgctgaatttattctggtttttcttcagttttcttaggccaagtactctatagcttatcaattgctggaaagaactaggctttaaaaggctttgatatctatttctcaagtgtcatcaagctttgaaattaaatggaagctttgaagctcatatctctacaaaagtgaaaagaaggagttgcaaatatttgatttagatagtggaattcttaaaactcataatttaatggcttatctacatctattaagtataataatcttgaaaacactttaggacatcttttcttctgcaggggctctgcaatttctgtaattctaatttggagtgaaccaagggtatgtcattttatagcaatggccaaagaaaagaaattgaagtgtcctttaagaagttctttagttaaaggatccaactagaactgctgagagagagagagagatggtggaaaaatgggtggcgatggtgatatataaagctagagagaacttcagagctcattcatatccaacttttagttgaattgatttcttctataaaagaaccagagcagatctttctgcctcatttttgtaaatgtggaaaatgaggagcagagagggaacagggcttgaactacgtcaccctgagaaagtggtagagccaatactgcttgattgcttgatgcaagcagcatcccctttgccaatacagacagccacagaagcactaagaaacattgcacccactcttctcttgggagctttatcttcttgtgcatccacttccttgacttacccctcatgtttggatatgaaaagattcactgtgcaatctgattgtacagtgcggtgtgctgtgatttcttagaccaggaaatatcagttgcttccttaaaattaaggcttgccatgttaatagtagccgtggtatataaagtgtcaaatgcattgcacatatcattttcaataaattcctcagaccttaactgttgtaagacctaacaagaaaaaaaaaagcatcattttcccattaacttgagttatcaggaagggtttcctataggaagatggaatgtagactgacttgaaaacaggaagaactcagacaagtgaagagactctaaaagaaactctaggaaagaaatcaatgggagaaagccaaggagcttagactcacatcaccattattaaaaatggaatgagttaatggtcaattagcactctgtatgtgatgggaacaggggtggagaaccataagaatggttttactggcacaagaagtcacacaattcttatcccaaggcacgtgtatagacaaaatttaaaacagctaagtcataacatataatgagtgattaaagggataccatgacaccacaagttaaggagagaatatatttttccagacaggtttaagaaaaactcctggggattagtttcaggttggcttgagaaatgtgaacaatttcaaacaggcagggaagggaaagcagaggagaggcactcctagccaatggaacagcatgagcaaagagacagaggagagaagacagagaaagtgtagggaaatcaacaaagcttgccttgaggtttgacttgaagatcagataactccaagcttaaactccttgggagagacaaaggaggaacttaggtttctatctcaaatatttattaaatatctactgtgtgcaggacattgttctaaagccttgaaaaaaaacaacaaaatccctgtctttgagttactatggaacttacttctttcctgtgatatttttgaagcctcagtggtggttgtattttgttttatttacatttaagccagcatatttataaaataaatactattttatataataatattactttatattataaaataaacattttatattataaatatattataaaataaacattttatattataaatatattataaaataaacattttatgttataaatatattataaaataaacattttatattataaatattatattataaaataatattttatgttatttaatattttataatatattgatatattttataatatttatattaggaaatactatacttacatggtttaagaaaagtaactagcaaataagagaaaagaaagtaaaaatcttcacaccttccccacccaaccactaatccctcttcacggagataaccaccattgacagattcttgtgtgtccttccaaaaatctgtgcatctacaaatacacagtacacattataatatataataaacccatgggtcattataataaacccataattttgcatcttgctttattcacttgacaacacactgtatatcttagagatccttccatgtcagtacatagaagttcatttcattcttttgaagagtcgcatagtacgaagtgtaaatgcttcataatttatctgtgcctggtgagagacatcaatgttttctctagaatttgtgccctctgtgcgtgtctgcaagtatatctggggaataaatttttagtgataggaatggaatgtgcattttctttttttctttttttggagacagtctcgctctgtcgcccaggctggagtgcagtggcgcgatctctgctcactgcaagctccgcctcccggattccccccattctcctgcctcagtctcccgagtagctggaactacaggtgcccgccaccacgcctggctaatttttttgtatttttagtagagacggggtttcaccgtgttagccaggaggaatgtgcattttcgcttcaataaatgtcagtctgtctccaaagagattgtactagtgtacccctgaggaattaaaagtcctaccaacagacacttctttacatcaatatggaaagaaaaaaatgatttactgttgagcaagcacaattgtacatgcaaataggcagcctgcaacagactacaaagtcaggatgaaatttcacacaattaatctagcaaagcaaaagaagaaaaaataaaacttctcttatctcctcaagagacaggggaatacataatgagatagacaatgagatagactcctaggttaacaccacaggtaggtgtttacatttcaaaaagcctctgaagccctcaaccttagagacgtctttgttttgtaaaccaggagactgggcttctctagccccaggggagaatgtaaagggttacattccaaaaggttggagtatagggttcacaatcggtaggctttcaagaaagaagctgcctcttttccctttataagcaaaaaaaattctttttttaaaaataataataataatactctttttaaattatctccacaccaacagtggagctgagcacctgtttaaggggagtaattattggtggtggtgatggtggtgtggtattttgggtttatttttaagctcagatacaaaatagaagtgtagggtaaacacacctgatatagcaataactgaagcatacccttagaataaccacatatggcagacacgtctgaatgggtgttccaagctagagagtccaggagtggtcaacctggagactcattccttgtctgtgaggaacatctgagcccccagcccatcccgtggaacatgggccatacaggagattgaggcctgagtttttggttacatgaaggctgccaggtggaggccattaaggggaggctgttaagtgagcatgctatagaaactgcatgctatttgcaagtggttgtggttttcctgcccaacccaccaccactggacggtatataaggtgaatatgttgtccagcctgctgccatgagatcatttctgtccgtaaagcagttttcctgttcagctcactgccactggactctctcccctgtatgtaagcccccaataaaaccccacatcttgtttgctgactctacacctcttctttagcctcttgaacatggtgccttccctgttgagctaataggagttcggcacaagaagaagttatttggaatgccccatgacacttcccactacccaaggtactccctccacctgacattcattccatttagcaatccagaaaaatccactgtaaatcttcccaggagcgagccctgtgtgaggttatgtggggaggtccccagtggaaggggcaagaccctgtcttctgggaactctgttaaattgagcagatgaagcccaaacaccaagttcttgggttccgggcagaatggcacagaatgccacagagcaaaggagaagtcatttctgcttgggatgaaggaggagtttgtagaagagctagaacaaaagccaggcttccaagaattacaacagtcatggcttattcccaaagtcttattttgaaaatgttcaaacctacagaaaagtggaatggcaaatgctaatataaccttggcacctagattgctgtgtcaatatcttgctgtatttttgctctctctatataaggatatgaaagtaagctggaggcagcatgacctttcactcacatgtacttcagtacccatctcttaactaactgcaatgccattatcattgccaagagagttaatattaattcaataatatcatctaataataatatatggtccatattttaatttctttacttgttcaaaaatgtcttataggtatggctgttgtgtttttgtttgtttgaaccaatctagggtcacatactgtgttatgataatatctgttttaatctagaactttgctttttaaagtgtggtcctgggccttgttagaaattcaaaatctcagggctcaccccagatctcctgaatccgaatctgcattttaacaagctcctcaggtgatctgtatgcacattaaagtttgagaagcaccgagctaaaatctcctttgccctttggtgtttgttttaaataacattgacctttttttaaagggtccaggccaattctgttgtagaaatccattcatagcctggatttgtcttagtattaactcatggttatactcagatgaaacatttttagtaagaatagtatataggtaattctatatacgtcttattgtagcacagctagagacatatgtcaggttgtcccattttttttgactataggtttagtcacttgattaaagcggtgaccaccaactatcgcctttgtaaaacattttttctttctcattaacaagtaatctggccaggagcagtggctcatgcctgtaatcccaacactttgggaggcaaaggtgtgtggatcacttgaggccaggatttcaagaccaggctggccaacatggcgaaatcctgtctctacaaaaaatactaaaattagccggatgtggtggcacacacctgtagtcccagctactagggaggctgaggcaggagaatctcttgaacccaggaggccaaggttgcagtgaacagagatggcaccactgcactccagcctgagtgacagagtgagatttcatctcaaaaaaaaaaaaagaaagaaagaaagaaagaaagaaagaaagaaagaaagaaagaaagaaaaagaaagaaaagtaatctatgtatgggataatactctgaagacataaatactcttcacttggtggttttgccatttcttaatgatccttgtctgaatcagctaatgcactgagggttgaaaaagagggaatgcctaagtctgtcactccttccaaatttattagctgtcattcttctgtagagaagagctccccattggaaagatggtggcaggaggaggaggagcaggatattccaggtgaggcaaaagagaaagcagtggcacagcccataagaaggcaagcccaggtgtgaggagaggaatggtagggccagaagtcagtccagattgtacagaggagaagaaacggaactagatgataaaaagatttgatagaagagacggagaggacaggatatcactgccatcttcaaactagaaagatttcctaagcccatatctgagcccaaatctatactcagcctcctacagccatctctcaagacctcaggtgttctgattgcctactgagtagtgtatttaagactttgctactcaaggtgtggtccatggcctggcaacattggcatcacctggatgctcatcaaaaatgcaaaacctaagggcccctccctactgagtcagaatctgcttttaccaaaatcccccgatgctggtcagtcttttaaagtgggagaagcactgctttaagccactgtggtccacttctcactttggcagaccatgtgctcccagtaaaaatagtcttcccctgaggattttctatgacttctattcacttttccatgaaatttcaggagatttttctgctcagctttatcctgccctcatctagagaggcaatgtagcaggacattgaagagcagtgccttcaaagtcaaacacctaagtttgaatcccttctgtgctattcgccacctgtgggaccttctataaacattatcacattatgaaatcacttctctaagtcttgatgaatccgtaactcttggggtcaagttaaaggccaaatgaaatagtgcatgtagagtaaccctcattaagtgcccaatgaattagcttgaaaataagaggtatccttggcaaaagtccctttgggccatgagccagagcccaccttacaagactatgtgagggcaacaaggaaaggaatgtggacttcccctggcatattccaaacagagctgcctttgatcatttttggtccacgggggcattttgtgtccaaagcaaattcaggagctcattgcatctgctgatcattcctctgtgaaaagaaacaagcctttcaaggtattgaggcaaattaagcacatcattaacaccaaggcagtgctcaaaatagctatgcttttcaaatacttgctaacactttataatatcttatgatgtccacaataacccagtggaaagatggatgattagccatctaaccactgattaaaggagaagaaaacactccaaggcaaggaagatggttgggatgggggtcattttacctggagacaaacaggttaaacatgaccattcctccctccatacatgaaaataactttattactgttgggaatactcatcagacatctacagaggccaaaaacagaggaagtacacttaaggaagtatacctcgttgataaccacggagacaaagtttcctgagctactcagtggagctgagaatgaaaacctgggagagtccatttgtttgtgcctgcattcagcctaggcactaccttacacaaagccaagtcattgagcaagatagttcacatttcctgagctaggacccagatccccagacaagattagggagagaattctaggactgggggacatcttgccaaagaggagttggtgaacaacacttagtgtaatacctgtttatgaacagtcttcactgaatttcaacagccatcatctccttagacattgcttctccacctccaaatgcagggactgcttatgggagaggggaggagggaggaatgagctcttctatcctttgtttctggaaacagcatctctcctagggcagtggaaagtacaccagagaatttcagtccaagatctgcctctgactcatgagtgccttggtttcctcctccataaaattagcttgatggactgaaagatgtctcaatctccctctggctttgattgtctaatcttgactaccatgggtagctaggagaagctgtaaagacctcatcccaagagctcttcaaaataggaatagtcacgcttctgtcatggacttcctgggccctgggtgaaggtttaaatgacaggtttctttcctgtttgagatgctctgcttttgacatcccatgtctgaaattaggaaaccagaatgcattcaagtgacagagagaaaagaggctttccttgacccccatataaattaggtcctcctctctgatattacttctcacagctgtgctattcaaagtgttctgtgggccaggagtgtcagtattactcgaaagctgccagaaatacagaatgttggccaggtgcggtggctcacgcttgtaatcccagcactttgggaggcccaggcgggcagatcacaagaggtcaggagttcaagaccagcctggtcaacatggcgaaatcccgtctctactaaaaatacaaaaattagccgggggtggtggtgggcccctgtagtcccagctactggggaggctgaggtagaggaattgctcgaatccaggagatggaggctacagtgagccgagattgcgccactgcactccagcctgggtgacagagtgaggctccatctcaaaaagaaaaaaatgcagaatgttaaactccccccaaatctgcagaatcagaatttgcattttaacgagactcccaggtgattcatatgcacattgaagttctaacagcactaccttaaagcactatgattcttttcctccatagctcttgccacaacctgcaattctaattacacatttatttatattttttaaatggctgccttaatgactaaagcataaaatccataggatgtcttttagtgactaacgtagttcctaccacagaccaggtgctcattcaaggtgtgctgcatgaatgattctctaggacttcccgaactgctagcagcctctgcaatgatggctgtaccaggtttgctattctagcctctctcactgtccctgtatatgtccctgggcagcttgatgaatttgatgattgtggtaagacatttcaatgcagatatttttcttagtgcatttgcacatcatgctaatcaatggtcacgcttggcagtaagttgtaagttgtttattaaattttaaaatgttgtgtgttgtctcacaagggcaacataaaggggaattttgtgatatcaagttttcctgcaaactgcatgcataactgaaagactacaaaaacttagctttgttaggttaaaagctttcaactaaggcaacaaagtcgtagactgttacagtaggaagggccttccaggacaagtttgcctcccttcccctgagaaggtagggcccaaatgtttaagctgacttcccccatctccagattggtgctgtgccagggctttgccttcaggagacctccttgactcactaccaacctcttgcactagagaagagatccattcataagaaaacaagctttcagcggaaggcaaatgacagacctcccagggaaatgttacaataataggggaactccagatggtcctagtgttcatacagaacactaagaaaataagctgtgggcggctgctaatttcttgctttggtagaggttaggaagttggttttttcgcatacacacgctcacacctctctaggtctttactaatattttaattcaatgcaatacaggagattccaacctgggcaggtcaaaagatgaataaaatacttcattccttattggcagaatattgtatgggtgtctccatggctggagagaaaggggagggacaatcagggtgtgaaacttagtgtctgaagaatttattaggggaaaagaactgtgcctctctgcttctgttaactccttgttgagagtccttgaactagaacctccctttagtcaccttcaatccccagcccaggattccctccttcaaaagacaatctgtttctatcaacctcttatttgtgtaaatatttatgtatatatttattacagaataaataatatactatgtaaatgtttaaatatataatatgcatttgtatgtatactacatgtgtatacatatttgtatatttaaatataaacttgtaataaatccataaggatggggacccaatttaattatgtatggtgtcctcacaatgcttggcatataaacacacaattaattcagaatttccaaccacaggagacatagagatgtaccttcccaggtatgtttacaacatacgttcacagatgaatcaaacatggaaaaaaaaaaaacacatctacttttatgatatacttgattattctcatgttgaccagaaggaaaaaaaaagaaaaaaacacccaaacatatggaggggggaaaagcaccagattgggagttgagtcctggctctagccgagtgtgatagctcacacctgtaatcccagcactttgggaggctgaggcgggtggaccacaaggtcaggagttcgagaccaacctggccaatatggtgaaaccctgtgtctactaaaaatacaaaacttagctgggtgtggtggtgggtgcctgtagtcccagctactctggagactgaggcaggagaatcacctgaactgggaggcggaggttgcagtgagccaagatagtgccactgcactccagcctggcaacagagcaagactcctttttttaattagctgagtgtagtggtgtgcacctgtactcccagctactcaggaagctgaggcaagaggatcgcttgaactcaggaggatgaagctgcagtgacccatgatcataccactgcactccagcatgggtgacagagtaaaactttgtctaaaaaaaaaaaaaaagtcccagctctggtccctgatcttctataaattaactatgtggccctaggcaagtcattttatctcactcaaccccgtgtctcttgcctgtggaacggggacagtaatcctcatcttgcatttctaatagattgtcaaacaaatggatagaaagcccattggaaactacatcagtgaattaatttttaaaattcaggtggaggatgaattgtaaattgcacagtactttaaggacaacaaaatgaaaaagaaaaaaaaaagttgtttcaactgaatgtcacacctcatgctgcttttttctttcttttcttccaggactccattcccaactcacctgacaacgtccccctcaaaggaggtaagatcttggaattaggtgtaaatgtgtagtaagtcatctagataaatgccataaagtgtgaaacctgattatcaaccagaaacaactctatgacatgacccaacagtaaagtgggtaggggtggaggcaagggctgttcaggactgagctgatgcacctgaattcatcttagcagctcctgaactcatccccacaagtctcccaccagctcttgacactcccactaatgaaaattctacctctggcataggcaggactgcaaggcagtgttgtgttaaatgcttgaaacctgaaatcagataaatgggggaatgaatcttggcttgacttcccactggggagcctcaactcctcatctgttaaatgggaataataataatactcacctcatcaaggtattggagaagccattcagatctcatctgtaaattgcttggcatggcaaccagcacatagtaatcattaaataactagtaatagctaaaatgcataatgaagtcaaggacttgtgaaaacagacttcctcctcactcctatatttccaatcattgaagtcactaattaacacgtcgtctctactagcctcagagagatgatatgccgagttcagttaacatcgatgatgagaaattttcagatgacctgattaatgtttttattgctcagagaaggaaaaggaagacccagagagggaaagtgaagtatctcgtccaaggtcatacaaagccaagcctagaacccagaaagatgtcctcatctctgatacagtgtcttttctgcccaagaacaccaactcccatctcagtcctgtaacctttagaacctagatggcaaacacagctggatagccagaaagctcagagcaaaaagtaaggaagtgagttaatgtaggcaccagggtagtggcacaagagtgtccttgagaccagaggacacagatgactggacacagctcctcacactcacagcatcacacttggagtgtccttcaagtttcccttgcccatgcctttcctgtggtttatcacccagagacttcaaaaataggggcaaaagtccccaaaagacagggattctggatctttcaaggcagactaataatcatagccttgtcaacaatatctcattttggctggaattacttagcatgtgacctcagttcctaccatgtctatgtaaacagtcacattaatattaaaaggagcatagtagaatgcaggggtaagcaaactttttctacgaagggccagatagtaaacgtttaggctttgggggtcactatgtctctgttgcaattagtcagctctgctgttgtagtgctgagccaggctgactacacgcaaataagtaaccacggttgcatttccataaaacgttatttatcaaatgaggtggtgggctggatttggcttatgaattggaggagtcactgcaggctttggagacagatgtttcagttaaacatgtaatgcacgttcacacggagctttggaaaaaccaaaaggctctgagtgaatataacttgcccctccccactcccactgttccaccaccacctccacccagactttccaaggaagatggaaacttttcattttttgacagggagaagggatttttaacatgaacacggtctcagtgacgaggatagttttgattaggtaataagaccttagccattctggatctcagtttcctcgcctaaagagcacttcaatgcaaagtcgccaagcataggggctctaactagtattctggtaccataataaagttgataaagttttcatcagtccaaagtgaagtacaaaaaataaggacacggtagcccccttttcacagggccaactatatctaatgtaagaggcactcttcctctgagacggtccttcatttttgtgtgtcaaaatgtcctttttttacaacatgaagttgatatagacaggagttaagttggcttgttttttgccagagttattttgttttgttttaatcatcacaataggcaaaataaaaagctgtccacttcatattggtctctgaattttcattctggggagaaatttcctgggtctataaagtccaaacttttcacaaccatggacgaaatcacttatcacatttcttcttatctggaccatgaatgggaatatcagaacacaaagtaatcaaaaccaacctcagtttacaattcaatgtttccacaaccagatttttttaaatgctaataatattcggttggtgtaaaagacattgcagcttttgccgttatgttcaatggcaaaaaccatgattacttttgcaccaactcaataatccccatgggactgtgaaacttttgttaaagaccttcccatacctcctttgggttcattctcacctcaaccctgtgagcaagccacagcaacatggggaatagtcttcccattttgcagatgatgcgctgaggcctaaagaagccaggtgatttgcccaaggtcatacaaggagttaatggccaagtgagaatccggggctcctccctcttctccctgcatgaccggcttccaccatgagatgccagtgacctgctggaggcagtacctgactttctcttgcttttaatgcaagtcaacatccccttaattcagcaatctgcagagacactgtagtagggtgaggtagaaaaaatattcctgggctccagaactgaccacatcaacaagtcttttctcctctctgagcctcatctgtaatataacagcaatgtactaaatgccctggaggagtctctccagctttgaccctttatgagactataattcttttgtacaatatgtaaaaatagaagaaaaaaaacctaacaaaaatctcaaggaaatctgaagtcacagcttccttccccaacgaacccagcttaaacaggcacagaagcagtaaattgtcccttttgaaaaaagccattgcaagacattccaggcagaggggaaccatctttcaggtactcttgggaggaagcttcaggggcagcatgtggtttgtcactagaaaggaaaagggcagaagctagacaccttctagggagccctttttcactggctgttgaaaatcttccaccatcagcagaaaatcagcagtggctcagagcctgggatgtagagctatgtgcacatgctaaagaaaaaacacaggatacacttcgctacagaggaaacaccaaaaatcaaacccttttgggtaatgaaaggatttctgagtcctatcacaagcttcccattcctggccaggatagcccccagccaactgacacctcacaggcagtaagccaggaagagcgcctgggaggagaacctttcccccacacccttctcctttctgggttttagttttctcacccagaagacagagttaataatgatttttgcatgaagccaccatgaggatgaaatgggacagcaattggaccctcatctgatacctggttgaacctatgtcctttgggcataggatccactctgttctttcatatccagataaaatgttcccatctcatttcacaaatgtcacggaaccaaggagaatgttgtaaagagagtgaagctcatccttctcctcatcactccttgtttcacttttctgcttccaccaaattttgaatctcatgtctgcacatggtttctggcttatttgcccaaatcagagaagacagccacttttgccttgatttccaagtttgaatagtaacccacatttatgaatagcgacatctacagaaggatttggggtatgcagagaagctggtagggcagtgtagcacatcccagtgcagcccagcagatgacacagaattgaatattaggtccctctgttcttgcaagacctcagctattccagccactgggaatttctcaagggacagctatcctccctggggttcagccctctgacacctgaactgactcactctccttcctgtcttaatgtccttctcccatttcccctccactttccacttccctcataaactctgcagaaattcaaattgttctgactttgatttgcagaatgattctggtcctttgatctcacctctgggccttctcaatataccctggccctttttataacaaatcaccccaccaaatgatagctcttacctgcactagaagaattctgtagtcagtgttctttcttgtactccctcattgcatccgtatgaggccacggcagagtgagaataatgaacgttgacaggcatcactatgtgccaagaattggctgagtacttagtaattcactcatgcagttctcacagtaagcccccaggaatcataattagccccattttataggtaaggaaactggagcacagacaggcttgttgccttgcctaaaatttcagagctggttaggaggggtgagacctcaaatccagcgtatccaccttgcagcccttgtgcttagctgggattgtattgtagaccatctgggaaaactcagtaccgcaaatccttccagtgcccctacctgctggccaagtctacatatccccttccagggctctatcagctctatcacttcttcggcacctgcggcccccagctcttggctttcatgtctcagaagtgcactctctgttaccaagctcagggtcacagagggccacacgcatgggtttgaatgaggtgaagtgctgaggggaaacatggtccatggcgagggttctagaggctgaatttcagctctggctttgcagctgaagggtcatgtgccttgggacaattccttccccactgcctaccagttaagacagatttgtctttcctacaaatgtaatgtagcctccaacacccaaaggttcctggaggccctaaggaagttggaacagtggatagacctcgtgtgggtcctgacaactccaccctcgcctgaattcagtctgtagccaaagttggggtatgaaatgcagaggactggcccaggaatttggaatgctgacattcaagtcttgggacttgaagcaattcactttccctctcagggtcttgggtttcctgttttctaaaatatcagaagtgaggggaacaagccagatgtcctaaccctgagatggattttgctttgattatagcgttctatgaatcaaacaaatatcttaggattctttgaccactttaacattctaacatttgcaattttataaggcgtggcagctaccctccttgcccctccacttgctaaaaagaaaatggcattaaagaagacgaagtgaggttggctctctaattttaccaaatgaacccaccccaaagaaacaataaaagctgcaccttgaaggcagtgacattaatccaagactaggttctcactaagacccaactatccctcatgtcccatggtcacaatcagatgacagccgccctagcggaacaccacactggaagcagtcaagaggcaacgtgcactttgggaggctgaggcgggtggatcacaaggtcaagagatcgagaccattctggccaacatggtgaaaccctgtcttcaaaaaaaaatacaaaaattagctgggcatggtggcacacgcctgtagtcccagctactcaagaggctgaggcaggagaatcgcttgaaccccagaggcggagattgcagtgagccaagatcgcactactgcactccagcctggcaacagagtgagggagggtaagggagagaaagcaggcccattccttgaaattgttttgttatgtatttcattcaaactatctagacacaacatgtgttggcttaagtttctacatttcaagcagcacaaaccatggactagggcacaggactcaaccactgtttggtatagtttgggtggtagacaccaggctcatttttatgcattatctcatttaatcctctctacaactctccatgacagttattttattattctcacttttaagaagaaaacaggacaattcaaagaggctgcatgatttttgcaaagccacacagctagtaatggcagacgtggaatttgaacataagtctgtctaactttctaaaattgatttgaacccaaaacgaactttctaaaattgctgccatacttttgcattttgaacaggtagggagtgtttttttattaaggttattagaatgttagcaaaatttaccctatgtctccagactcacctttccttttaaattatagactttaaagatgcttcttacttacccacagtaatgtcaattcaacctgtgtttagtataaatgaattccaaggaaatgcccatagtgtcagacaggtttactaactgttgcagatacactgcaacaagtcaggactgaaaagaccttaacatcccaaggaaagtaggtggggcagggggcggggggaggcaggatttaaattatttaaaggaattccaacttgaccttaatttatatttactgatcacttcctatgtgctcagtcagcactaagtgtgttcatatgggcattctccaaatccttttggaaatcagggtcacctagtggtcctttgtttaacaaatggtccatcctgcagtttatctctctattactagttggcttagtgatatcaaggaattggtcaaaagcctcaattacttttgcaccaacctaatagttgaaatgacccttgctcaggttaaggactcactttgaatccaaattttatccagaggggagagactgtcctctagatgtcactgttgggactctcctggatattgtccctgaagcctggaatgaagaagccagggcatggcagatgcagagtcattaggataatccctttccttcttggaaggattaaaacatttttcaacaaatgtaaagaggattcagcacacattcctggaagcatcagatagccttaaacacttaggtacttaattgagaagctcccgtccatcaaataatgtcatgagcttcattttaatgagcatttcatctgccaattcactctgctaagtggcattgctaaactgtgccactataacaacaaagaaaagaggagtaaggcagaaagaatctactttactgagtgtctcctctagccacaggccacactgatcacttgacatccacggtctcattgcatcttcatgacatccatacatttaggttgattgttttaattctcacttaatggatgtggcagctgaggctcagtaaggggaaatgacagatccagagctaaaagctatgaccagaattcaggtgctctttttgcgatgcatcgtgtcttccttgttcttatatcaaaggtgctgtacatctggaaggtacctggcactcaaaccacataccatctggccgggatggttggcttggtctgttttgccatggtagagccgccttgagcatatttgcatctttatgtgcccatgacttgtaacttggcagtgttcagcacatgggcctgaagtcatctgctggcattctcccacaagatggaacccaggagctcattagtgcttgttttcccagcacctccagctgtcttgtcagttttcagttccagtgtctgtagtggctgcaaacccacttcttcctgcatttaacccttcctattccacaggaatactgaaagtcagagaagagccctggattagaagtcagaagccctgtgttctgaacccagctccaccatttacctactgtggagtcttgggccagaccctagtctctctgggtagtctcgccactcctaaaactaggatctctgttagcatggcatttagtgaccctttctgtctaatattgtgaaatctcaaggtgagagctagtcttaaggtttccataatcttgaccttctagaatatgctcctttcaccacctcgagcaacctctctttctatctctctcctctgtgtgaaactggccaggagggttttgttggcacatctttctcttcagcctctcaaacaaaaccacagaaagtcccatgatccttctagaagaggctaaagcttggaaagatgatttacaaagctgatgcatctgaaagctttggtcctcagggaagttcaggcagtgctagggttgtctgaaagatagactgccctacagaaagagtaaggagccctggtctctggtcctgtctctctcactaactctctggatgacctaggatcagcctgccataggggcaacattgaggagcacatgggttatgtgttcaccaagcctgaaccaggccatctcagggaactttcatttctccaaactatgcaaatccttacagaaccagactattcataacttagattgtcctcagagctaaaatattctgttctactactgcaggtgtctgaaaacctgaatgtgtgaagacacagtctcctaccttgggtaatgcaacatgcccataaagatagacaggtgcagctgggaccgactccccatcccaaaccttcccacccccaccaccagcaggtctgataggggatggctgagtctatacagcctgctgaaataagctaggtaggccctttaagacagatcatcaaatccacactgctcttcatctattatgttggtgcagaagtaattgcagtttttgttattgcttttaatgccaaaaccacaattacttttgcacaaacctaatagggacactagagcccagagaggagaaatcccaggattctaactcccaggtcatcaactcagccgtgacttgcagacagttctcacttcccccactctgatgctctgttcttcaaactaaacctctccaggcatcactttttgctccctctgctcccagccttcagaattccagggacattgcagaatttcagctgcatgtaatgccactatttataagtcacgtttttctgtcttcataaccaaaaaagaaagttatatcatagactcacagggtgatgagaagactcaggccacacggctgatgacccatgaaatgttcatctagctcttgataagagcctcatgacctccaaagcagcccacctcttttttgagcagcactgactggtcaactctgtgagctgccagcactgtgactcacagtgtgacataggtgtttttagtgtacgtctttccattgctgcatctgagaaatggggattagagcagtgttagctcttagctgagggcttcatctccttcctcttccacttggaggtttagtgcttgggccccacggtgtgccgacagcctcatcaagcattaaaggacagaggctgtgcccttctctggggtcttctccaagtttaacagcccattccctcaatagctcctctagtgtcctgcttttagcccctttctgaaccagctctggcaacatcattcctaaaagggctgcctgtgtttttccctttagctagaaaccatctaaatgatttttaaagaaaaactaaaatataccatgccatttgacttcaggaaatgcaaatgtttcaaaataaggtgttttttttttccatcctcgggtttctcagaattacaactgaggtcaacccaaaggggaaaaaacaacaaaagaaccagaacgtgtgagaggcaagcctgggcttgcacttctccagccacctgtttacagaggctcacctgccataaggggtaaggagaacagtgtaagagggctttcggccaatgagcagagcctgttcttgatgttttgtgctggcctcagcccaaggcatgaatcttatcttcccatctaatctagcctgacctgcaatgccagtgggagaatgaggccctgtgttattctagccctcaggcaaaaggcaagccaagcgtcctgattcacctcactgttgtcctaagtacttactctgtatccacagagggaaacaagaaagatgaactaggtgattcaattcaacaaatatttacagagcatctgctagactgggcagtgggggtttataaacaggagtctctgccctgagggttcactgtctgatagaatgggcaaataggcaaaggaagtatcctggaggagctgactgctaggctgtgtttcaaacaaggaaaaacttgcctggtgaaggaggcagtccaggtagagagcccagcaagtgccaaggtgtaatgataaatcaacattcctaaatggtatgtttagggggactgcaaagccccaaactcccggacagcagtcaggaatccattcgggcagcggtcaggcagcctgagtttggatctctactccacccctgactacctgtgtgaatgtgaacaagtcagttaacctttaaaagggtccatttccttatgtacaagatagacttaattatggtacctctcttatcgtgttattgtgagaattaaatgaaataatgcatgtagcatacttagcagagtacctggaaaatggctatcactcaacatgtattagttatgaccattcatattattatcactgttcctcctcgttattattactattggaacataaagggaaaggggaggagggaaggtgaggggtgagaccagagagttcagtaggagtcagaacaatggggaccatgaaagccatgctgaggagcttgggcctgatcctgcaggcgaaaggagtcagaaagggcttccatgcaaacagacagccaggtctgtctccctggcttgatgttctgcagcttagagtaggaggctacgccaggaggactctctaaccatagtcacagtccattaggagcataagcagccattagtgttggggttctgactacaaaccccaagagtgtgggctgtgggctgcaacaggcaggaccagagcactgatcagaggatgcatgaggatgaaaccaagggaatgacagctgacccactggctctcaccaccaagagagctttggaccagaagctctatgtggatgcagcagataaggaggaaaactgcccctgcttctgcccggagtgcctctcgcagtgagcttgttcagacagcagagggaactcttcatttaactttcaaccactccaaagcccccatgaagctatgaggatggccaggagggactttctcagggctgggcagagactgcaatgggaaaggttgtgagcccagcaggtactactcggcaatgcagtgagcaaatatcccagggtgtggctgctccattgaatgggccgttggctgcctaccgtctgatggatggactacatggtcatctctggtgacatctttgagaagatgtccatgtcaggtcaaagattgtccagttttacacatggggaaaccaaggatcaaagaagagattagctctgaataagttgaattcaagtgtcattgcaggaaatgtataacttgaatctttgcatacaaaatattaagtagttactgtaataaaaaaaagctaagccaccatcactagtgaatatatgaaaaatatttttatttcttaaataccataataacataatattatgtttgcctctgccaaggaagctccaaatagcaggacttctgttaagatttctttaaccctgtgtcctcttaaaattgaacaccaagatgtttttatcttcgttgtctagcaaaatagcctagaacaggaaacctggcctctggaattagccatgggcaattccagcatttacacaaacttgtctgaacttaggcgatggtattgaccacctctaggcatcaaagttaaccctgcaggattagtctgagaactagattagctgatatattacccagctgtaaaagtacccagactagtttctggtgtgtggtagataagttgacagtatttactatcagtattatcattctcactaccactgcctggcaaggcaccacgaaacaatgtatttcacctgcgtggcccccagatttttttcccatctgtaaaaggggcttaataatacccctctcacagagttgctgcaaagattaaggagatgaaatacgtatagtgccaaaaaatggcccctgacacattataggaatggatgtcatatttgtttccttccctgatttccacagtcttccataaaagtccaagtggaagcaatcaataaaaataaatttaaaaaattaaaatcctaaaatacctgatggcaaaatgagaaataaagagcttttctccttattctgaaaatggaaaacagaacggtaattgtctccatcaaagtgttgtagaaaaagatcaggtatttccagatcccaaaacggcaaaagacattttaatgcatcgtctccttatttttaggaaattgctcagaagacctcttatgtatcctgaaaagggctccattcaagaagtcatgggcctacctccaaggtcagtaaccaagcccaggaaacctaaacatatgaaaaccgcttctgtggcttttcagcaacttttaagccagaagtcataattagagtcccatggccaaatgtgacctgcagatgtgtactgtttagtctgcaggaaatttttttgtaatttgaatttgaatgtcttagcggggagagcgtcattctccaaagctacaaggcttctctttcctcagtcccattcactcctttatgttgcctacctggcctctgtgggcattcatggtccccaccaccactgccaccaccagccccacccctcacccctcacccctccttattcagctacctaccaatttcagcaaagtacacagtccttttcctaatgcaagggaggcaggcacttaatctctgcctctatgaagttattcacaagggaaccataaaattgccttgtccccagattgacagcttaatgaacatgtcagcacagggccgatttgcatattgcagtgtgcttcaggtaagaggccccttacaaatgaagcaataagaggcactttagactgcagagtgagaaagagatggccaagattctctgaatagccatcctgctcattttaaaaattcaattttgcagttagattagttctcactcttcagttgaattgcaacgaggtttaaagggaaagcatggaagcaattaaaactagcatgccagcttcctggccctgaaagtcacccttaccagtcagtgctaattttcacgtgttaggacttagagactcaccttccaacacaaacttgtcagcttagagggtctgctaattctctgcttttcaataaatcccagatggcaagagccccttaataagcacatgggggacctgcacaattatttttggctgccctttgaagggaaaaaggcattcaaaaattcagacaatgaaccgttagaggatacatcttaatgtgaaaattaatggcgattctcctggacatcttcaaacctaaattggatattaactgaataatattattgaatgtcctaccttgtactttctgcaatgcctatcaaactcaatattattgaatttcctatctctgataccttttgcaatgaccattcatgataaatgaacataatagttccaatcttgtggagaacagagtccaggagcttatagtctgaaaagggaaagttcatcatattcatcatagaataatataatatgataatgattcagtggaaaaccattctataggaggtagaagtaaagtaccatgtgtgttctgaacctccagctttcagcattgaagaaaaggaagaggggtggttttatacctgtgccttgagtaataagtagactctagagggagtaacatggaagatattcagatgattggaacattacagaaaacatgggtcttgaatgggaaactttgaacaaagacttagaattttgcaatgcgtacctacaatcttctcaataattctgttttctatacttctctttctagtggcaaagcatctaaacaaaaccaagttgtcttggaacaaagatggcattctccatggagtcagatatcaggatgggaatctggtgatccaattccctggtttgtacttcatcatttgccaactgcagtttcttgtacaatgcccaaataattctgtcgatctgaagttggagcttctcatcaacaagcatatcaaaaaacaggccctggtgacagtgtgtgagtctggaatgcaaacgaaacacgtataccagaatctctctcaattcttgctggattacctgcaggtcaacaccaccatatcagtcaatgtggatacattccagtacatagatacaagcacctttcctcttgagaatgtgttgtccatcttcttatacagtaattcagactgaacagtttctcttggccttcaggaagaaagcgcctctctaccatacagtatttcatccctccaaacacttgggcaaaaagaaaactttagaccaagacaaactacacagggtattaaatagtatacttctccttctgtctcttggaaagatacagctccagggttaaaaagagagtttttagtgaagtatctttcagatagcaggcagggaagcaatgtagtgtggtgggcagagccccacacagaatcagaagggatgaatggatgtcccagcccaacctctaattcactgtatggtcttgatctatttcttctgttttgagagcctccagttaaaatggggctccagtaccagagcagctagcaactctgccctaatgggaaatgaaggggagctgggtgtgagtgtttacactgtgcccttcacgggatacttcttttatctgcagatggcctaatacttagttgtccaagtcgcgatcaaggactctctcacacaggaaacttccctatactggcagatacacttgtgactgaaccatgcccagtttatgcctgtctgactgtcactctggcactaggaggctgatcttgtactccatatgaccccacccctaggaacccccagggaaaaccaggctgggacagccccctgttcctgagatggaaagcacaaatttaatacaccaccacaatggaaaacaagttcaaagacttttacttacagatcctggacagaaagggcataatgagtctgaagggcagtcctccttctctaggttacatgaggcaggaataagaagtcagacagagacagcaagacagttaacaatgtaggtaaagaaatagggtgtggtcactctcaattcactggcaaatgcctgaatggtctgtctgaaggaagcaacagagaagtggggaatccagtctgctaggcaggaaagatgcctctaagttcttgtctctggccagaggtgtggtatagaaccagaaacccatatcaagggtgactaagcccggcttctggtatgagaaattaaacttgtatacaaaatggttgccaaggcaacataaaattataagaattcactataccttcccctccctggaactcaggatccaagtctagaaaatgaaaggactgggtttgaattgcttcaaaacctcttccatctcagaagaccagaccctgggaactgagattccagacacaattttggaagctctccaaccaaaataaggcccccctaccccagtatataattgaagacactagtaacacctgactgcatctcatctcagcagagccagaatatggggacaaggttcagggtgccctgctgaatggtgtgaacagcaggatctcaaggatgtaatggaaagaactaccacactgaccatccagaatctaagagaccatctgggtgtttgggaaaccatctgacgaggcctgactctattccagttagattgacaataattgagcagcaggcatttttcatttctggtcaggaaagcattgtgcctttagcaaacaatcagtgtgcaacagtgatgtggtcatctagccagggaatggctgctccatcccctgcataatatattcctgcttcaaacacctctcagaaaaccagttccgcgagggtttttatatccccacaaagttgttgagagacaatgatgaccctggaagtggggaggaggacttctgagaaacagcaacctctctcctgattggggtagccatgagatttctctagctatatccaacttggcatctgtacatcatctttggaggaacatcttatttgtggaaggaccttgacaagccgtttgagatggaatgtaggccctgatgttatgcttcagtaaaaaaagatggaagcttccctgctataccaaaacatggagcaaaatttgcatttttctcaagaaggagagaaaaggagtaggactccagcaaagtttgtcagaaggaaagctagaaaagatttaaaagaaaaaaagaaagaacaaatcagcagtggtggtatggatgaaagggacttgagagaacaaaaatggctaagggaaaattttaagtcatctgctgagcagtgtgctgtgtcaacctcctcctaggtctcctctatgaaatatttagtaaagtctacatttctctttaactctttctgtgagtagattctttgggagaagcaggcattggaagaggtgttgaattcagcaagccaaatggtctgtggtaaaaaacaaaacagactttgagactcaaggctaaaaaaacagggaaatggctggcatttgagtcacacactaactgcataggacaaatgaatcttgcttaaaccaactcatgcattcttgaaaaggtatatgcaacccaactgtgtgttaactaagcaatttttttgccatctcacattctaactcgagaaagattccattttcatttttcaccaactgttctctgagcagaggtacctgacttttgcactgtgagtggtttctaatctcagtctctgtcaagcaatgctaagaaagccaacacctaaagacacaaggggtacatcatttaaatgaataatgtaaccaaacaaacaaaaaaagagaataatcattaataactcaactgatagatatgtagggagtaggcaacccaggaagtttaaaactaaattctgttactcttgagggttaaccagcccctgggaatgttatgagcaaatgatactccatgagtaaaatgatatctatgcaagtaaaataaataatttatctaactgggaactcaggctacctaaaacatatgcctctttggtaaaaactcaacttgagctccttcccttgctcctaccctctgaaccccacctccccaccacacacacacacacacacactcagtgtacttgcagaacttgtagaggaagatggtaagtgagctcacaaaaacataacaagtcaatgtagagtcatccaaactggagtggagtggtgctatcttggctcactgcagcctccccttcctgggttcaagtgatcctcctacctcagcctcctgagtagctgggactacaggcacgcaccaccacacccagctgatttttgcgtttttagtagagacgggatttcaccatgttggccaggctgatctcgaactcctgacctcaagcaatctgcccaccatggcctctcaaagagctaggattacaggcgtgagcaaccacacctggcctctaacccttttctgaatcatatattgaccatgtactgagtctatagaggatagagaccacctgtgtctcacattcaaatcaccatcccagagtgaccggggcgagagcagggaagagcagaggaaacctccaaatgtggggactgtccaaagtaaggttggaaagacgtgacctgaggaattgcagaaaggctataggaggccctatcaaggctggtgggaaataatggagattggaatatgagactgggctcaaatgccagctctctcactaaccacactcgaggacttcgcaagtgtctgctccctgctgggcttccaaccaatgggacttccatcaagcctggcagatctctcaggagtgttctagagatgatacaggctgacttctccatcctcttaatttaagggtttgtcccttccatcccagaataagtggtattcctggaattgtgggaggctcccttgtctgacagattctgccagcttccctcagcacttcctccttttagttcttgtccacatcaaaacctcttagggcactaggctattctctgagccatcctttatgtgactggagattctgagaaggaattagatagtagagttattgtagagtaactactatatatttaattgtttgaatataccatagtttgtccattcttctatgcaagaacatttaatttgcttttaggtttttgctgttacacacaaagctacaataagcacatcttcttcttgcacacctcccacccctagttgccatttttctatacagcaaaaatactcttggaaaattataaatggtgtcacaaagacactgagttaaccatggctagcgagggtttagacacctctgtgatcagagctcatgacctggagcttagtctctggaatctgaatggctccttccatactttctaagtacttctctgctctgtacattcattcaacacacatatcccaagtgccagtgagtgccaggtcagtttacaatccaacatggtatgtgctacagctctgccaagccactgcgaaatcagccctcattagcataggtttgaaacatgcctttcaatgcactctggggcttccctggatctagctctcttcctggagagtaaacaaacaccagaaagcatgaaggacaagcacagctccagaagatttctcccccaagatcaaatgtctgtattcctcatgggctcttctcacaattctcccctgaaactctgcgatggaagattgtcactcaatgtatagtataatgactttccaggttttttttctaccatgacccagaagaagaaaggtcatgttgccaacgaggactaagaaaaaaaaaaaaaaataataacttactgtgaagacctgaattgattttatgatgctctcttaagtcacaacccacatttccaaaatactattctagtgtgccttctcctgctccacatgttggaatgctaaaaatatactttccttattcttttgcagctcaggctctagtattatttagtctgaaatggacagaattttggaatgtttgtccatccagctagcaaggacagctgtggaggtgtttggtttttctgcagcttcgtttgcagaggttttcatgttcaaatacgagcttagtagttggggtgagcctaggtggtgggggagaagcatccgttctgctgatgtagtctgttgcagatgtgcactggttctggagcccggcagcagtagcggcttcctgattgtagtggtttcctgttcgcggcagcagttttgtggttctagaggggcaggcttcctgattgcaagattattgaagagacagcagctactatagcagcccagttcctaggagtcgcattataggtttctcctgaaagctcaatctcgattctgtttcctcagacctcctgacaattctacaagccatttaacaccctgtgataaaccccttcctgccaaacaagctaacgcgaagtctgttctctgcaactgattcctcatgaatataataacaacatgtacaaactgacctcaccattatgtacaaaccaaccccaccatactcatcctgaacttaacactattcctacattccaaatctcaaggactatctcagtctctgaatatccttcttctcacttcctactcaattaacacccaactaattcctccagtttcctagttccagccaccactctcaatacctcctaactcacagcactgcctccagtcttactccttataaatcccatctccagacagcaatagcatctcccgattgttcttggaattgatagtgataataaccatttatcaagctcttacatgttatgacttttcctgcactcacttatttaatcttcaaagcaatccaacgaaataggcatcattgagccaggcacggtggctcaggcctgtaatcccagcactttgggaggtcgaggcgggcggatcatgagatcaggagttcgagaccagtctggccaacatagtgaaaccttgtctctactaaaaatacaaaaaattagctgggcatggtggtgtgcgcctgtaatcacagctacttgggaggctgaggcaggagaattgtgtgaacccaggaggcagaggttgcagtgagctgagatcatgtcactgcactccagcctgggcaacagaacaagactcttcctcaaaaaaaaaaaaaataggcatcattatccccattctttatataaggacattgagagtctgcgatgttgaggagcatggccaatgtcacagtcaatggacggtagagttgggatttaagaccaagtttgcctaactccacattccacgctccagtcactatgaacatagccttcctaaactctaagctctttccaccaggtctctccctatctatctcctgaatgtctctctagttttgtgctcagccccacctccttgtgctctatgatcaaatcacattgcactccttccagttcctccaatcttccatgctctgcctagccaccagaagcttgcagataattttccttctgcctaggatactcctgtcacactcttttgcctgattaactcctatcattgttctgatttccatttcaatgtcacctcctcagagaagtcttcctgactctgctggcttcacttaatgccttgctgtcaccttccatgcttccccatcgttaattgcatgacactttacccttcacccctggttctctctatcattcctctccaacattcaaattcccagaaggcaggaaccctaccaatcttatttagcactgggtaatcacagcccagcccaattcctaggacatagtagatggccattcaatacatatttcttaaatgaataatcaaagaaaaccactttaaacataagtccgttttaaggaaaagatatcaagccataccaaaacaaaagaaaaaaaaaaacagttcttttcaaaatatggaaatgttcattgaaagcctctatttttcttagaaataattttcaggccggggacagtggcttatgcctgtaatgccagcactttgggagggcaaggtgggtggatcacttgaggtcaggggttcgagaccagcctgaccaacatggagaaaccccgtctctactaaaaatcaaaattagccaggcgtggtggcacatgcctgtaatcccagctactcgggaggctgaggcaggagaatcgcttgaacccaggagaaggaggttgcagtgagccgagattgcaccactgcaactccagcctgggcaacaagagtgaaactcaatctcaaaaaaaaagaaagaaaaaaagaattttcagggctcaggagataagaatgcctattagagaaaggtgaaatttttagaaagcagaatctacctgtgccatctgagaacatggaaggaaaaaaaaataaatctttgcttactttattgaaccccttttctgagcaaggtgtggtatatttgctgtagaatccatcacccttcctatctctgagatatctatatgctattctagtcattttgtgattagaaatagtgagattaaccttagaaagttttttaagttttattttatttttgattgacacaaaaatagtgtacatatttaggtagcacagtgtgatatttcaatacatgtatacattgtgcaatagtgaacatatcccttactttaaacagttatttctttgaggtgagaacattcaaaatcctctcttctagatattttgaaatacactagaaagtttaaatcaaaccttggtataccttagaatcctgaaatcccaggccacttcctagagcaattaaattagaatctctggatttagaacccaggcatcaggattattttaagctcccaaatttaagccaaatattaagagtcagtggtttaaatctttgctgttatgtcctggtgcctggtatcaccagagagcttgttaaaaatgcaggcatctcatacatacctaaaaactggaacagaatctgcattttaatatgatccaagagattcaggtgcaccttacaatctgaagaacactagttggttgactttttctggtaagtggagaagattgctggtaatccgttatgtttctctgtttcccccaagtggactttcatgaattggcttggtcttccttgtctgctgcttatgcaaatgtgagggtctaaacactacaaaaccatcaagtcaacgtgatggtattcatttgtaatgatcaccactgaatttttaacaactgcttttgatccaactgtctcccttgggaatattgggcaacactaggaataatctggacaacatgttgaaagctttggatgcagtttagaaacttctatgggggctgtactttccctatagccaaggaaagagaaaaaaacaagtctgagggtggcagatgggaaagaatagtggccttggcaactggaagccagtttcaatctgagctgaagcaattactaactctatgaccttggcaagtcacatggactttgtaaacttaaattttctcagctgtacaatgggaagctgttgggagaacaaacacatagaataagcttggaaagtgtacaactcttggggtattttatcatattcagtgtctgtgaaggagttagaccttggggagaggagtaggaaaaaatgaatcaatgcaagtttgagaaaagtgaaagttcctcaaatccactgaagcctattcccatctgcattcagaaaagccagccattggatcaacaaaggtctctgtcaggccaactctcaaaggatggtttcatcctgcagggaaaactggactagataaccaactgactgtttgcgagatgcagtatcaaggtcctctccctgtgcctctctagaagcagcactgattgcactgcaaatgaacacttttctcacttagaaatgagcacttagaagacaagaagaatccatctccaaatcccagcacccaaatcagtgtcctacacaaagtcagcactcaggaaatgtttagatttcacttgcaacaggaagagggaattaccaggcagggatatcagctaaactagtcaggaacaagctgatttgaaggctgatcctccttcacaaccaggaggctccaaacaaaaaccagctgaagtatttcatcatttcctttccattgctagggacgcagatgacctaacctccttgacattctgactatgccttccgttctcacaatgagtctcattttaccagctggcctgatgcagtcagcgcatggcacagtactcaagggaagaaaggtcacaatccatcacaggatcaatacaatgggatgagtaaacagcaagaaaacactgaaggaggcttcatttctaccaccaacattacattcatacactcacacagtcctcaattgcatctggtcttttcatcctcctcattcattactttgatgtgtttacttaaaccgctttatgttacgtaaatagatataattactatcacttactgaacgcttgcttgccaggtttcaggcaccacatggaagccttcaaatactgtagtctactgcatctcacccttatgagatagagatgaccattcccatgttgcagatgaggaaacagaggctcgaagaaatgcttaagtatgtctaagtttcagcagctcatgagctgaagagctaagatgtaaccactgcagtttggctccagagctatatttctaaccacactacactgcactaccctgaggctacttgacctggtgcctgctgattcctttgtccacaaggtccttgcccttcattcacatcttgttaatttgacctcattcataaaatttcaactcagacattattgctcaagaaccattccgctaaattagacatgcaacctggaccttgatattctcacttctgtctaaaaatttactacactcactatgacagcatgattgtacatttgcctccctgctaaactgtgggcttctgagtaacaacaacgtcaaaatgtatcacatctctcctgccgatatctacaaagtaaagttattctttcttccagattactgtggcatgatcctccaccattcacactctaccctggactctgggaagggacactgctgccttgaaactctacaaccctgaaccttgatgctggttgctgcagacaagaactgcttctaccctgggtcactgtcactgctaagtggaaagtcatgaacttgatggtaccagtcactctgggcctaaaccgacatagccaggaaacggttcaccccccacaaacagaatcatctagacctgtccatgatttggaatcgtggcccaatacttcctggccccagagagagaaaaaagtctgaccaccccctactcaaagtgccaactcatttccttcccagaattaatcacttcccaaaatgtatgactgtgtgaacatcaattcccttcaggggaaaaccccactcccacctctcaggctgtcatcttaccctatgaccccaacctgacaatcatgcaacagcccattattggtaccttttccaatgtttaggtgactcattcttatctacaatcactttgttgttctaggaaagtttttgacacagcaggcatttgatatatatttcttgattaaatgaaagattaaatgaataccatcttagatgtctgcatagtgctttaaagtttacaccactattctttcaaatagtacaagagagaactaagctgtgtactcaactgggaagaagcagaactgagagtgggagcacctggtattctgatttcttgtctagaactatactatattctgagatcactaaactacaacctcaggcgactctgcctacttttgtaaataaagttttattggaacacagccacattcattcatttatgtacagtctatggctggttttatgctgtgatggcagagttgagtagctgccccagagtccaggagctgtttacagaaaatgtctgatggacctgctatatattgctggtgactccaggtatgtttagatatacacacttacaacacacacacacacatacatcataaattttcccacaaagagaaccatatgatcactgtctatctgaccttttcaatattgtcagctgtgagaggggagtaccaactttgttggaatcatgtatagaacatgcctctgagtgctaagggattccatgggctaatgcatgatttttgaccatggacttgataatatctatccaacaatatgaagaagtagtaaacttaaaaaagaaaaggcctcagaggcaaatccaccaaaagcagtgagaaaggaatagcttccaaaaagatcatgttttaaaataaggaggttagagatgtgaggatttttttcttt

SEQ ID NO: 1244 - DNA, 2084 bp, Homo sapiens
aaccgtcattttcctacgcgccctctgacatcagccaccttctctgtagctagtttctctgcacacaacttaatccctggcaatgaaaaatgaacctctcccccacccttgctgccgcctctcgcctcacgcccccagagaagagtttctccaccaggcagcaggtgaaggtttttttccaagtcacatgattcaggattcagggggagaatccttcttggaacagagatgggcccagaactgaatcagatgaagagagataaggtgtgatgtggggaagactatataaagaatggacccagggctgcagcaagcactcaacggaatggcccctcctggagacacagccatgcatgtgccggcgggctccgtggccagccacctggggaccacgagccgcagctatttctatttgaccacagccactctggctctgtgccttgtcttcacggtggccactattatggtgttggtcgttcagaggacggactccattcccaactcacctgacaacgtccccctcaaaggaggaaattgctcagaagacctcttatgtatcctgaaaagggctccattcaagaagtcatgggcctacctccaagtggcaaagcatctaaacaaaaccaagttgtcttggaacaaagatggcattctccatggagtcagatatcaggatgggaatctggtgatccaattccctggtttgtacttcatcatttgccaactgcagtttcttgtacaatgcccaaataattctgtcgatctgaagttggagcttctcatcaacaagcatatcaaaaaacaggccctggtgacagtgtgtgagtctggaatgcaaacgaaacacgtataccagaatctctctcaattcttgctggattacctgcaggtcaacaccaccatatcagtcaatgtggatacattccagtacatagatacaagcacctttcctcttgagaatgtgttgtccatcttcttatacagtaattcagactgaacagtttctcttggccttcaggaagaaagcgcctctctaccatacagtatttcatccctccaaacacttgggcaaaaagaaaactttagaccaagacaaactacacagggtattaaatagtatacttctccttctgtctcttggaaagatacagctccagggttaaaaagagagtttttagtgaagtatctttcagatagcaggcagggaagcaatgtagtgtggtgggcagagccccacacagaatcagaagggatgaatggatgtcccagcccaacctctaattcactgtatggtcttgatctatttcttctgttttgagagcctccagttaaaatggggctccagtaccagagcagctagcaactctgccctaatgggaaatgaaggggagctgggtgtgagtgtttacactgtgcccttcacgggatacttcttttatctgcagatggcctaatacttagttgtccaagtcgcgatcaaggactctctcacacaggaaacttccctatactggcagatacacttgtgactgaaccatgcccagtttatgcctgtctgactgtcactctggcactaggaggctgatcttgtactccatatgaccccacccctaggaacccccagggaaaaccaggctgggacagccccctgttcctgagatggaaagcacaaatttaatacaccaccacaatggaaaacaagttcaaagacttttacttacagatcctggacagaaagggcataatgagtctgaagggcagtcctccttctctaggttacatgaggcaggaataagaagtcagacagagacagcaagacagttaacaatgtaggtaaagaaatagggtgtggtcactctcaattcactggcaaatgcctgaatggtctgtctgaaggaagcaacagagaagtggggaatccagtctgctaggcaggaaagatgcctctaagttcttgtctctggccagaggtgtggtatagaaccagaaacccatatcaagggtgactaagcccggcttctggtatgagaaattaaacttgtatacaaaatggttgccaaggcaacataaaattataagaattc

SEQ ID NO: 1245 - protein, 234 aa, Homo sapiens
MDPGLQQALNGMAPPGDTAMHVPAGSVASHLGTTSRSYFYLTTATLALCLVFTVATIMVLVVQRTDSIPNSPDNVPLKGGNCSEDLLCILKRAPFKKSWAYLQVAKHLNKTKLSWNKDGILHGVRYQDGNLVIQFPGLYFIICQLQFLVQCPNNSVDLKLELLINKHIKKQALVTVCESGMQTKHVYQNLSQFLLDYLQVNTTISVNVDTFQYIDTSTFPLENVLSIFLYSNSD

SEQ ID NO: 1246 - DNA, 64482 bp, Mus musculus
  misc_feature (1)...(64482): n = A,T,C or G
gttagttgactatgttggtactcctgtggagtgtctatcccttttgaggcccaaaatcctttcagatcctattcttccccaagagttcccaagctgtttgactgtgggtatctgtatctgtctgagtcagctgctaggtggaacctctcagaggacagcgtgctcctgtctgcaagcataacatattgttattaatagtgtcagggtgtttgcccatgggatgggtctcaagttgggctggttactggttggccattccctcagtctctgttctatcccccatgtctgcatttcttgagccagggtaaattttgggttgaaagttttgtggttgggctggtgtctctattgttccactggggttcctgcctgattacaggaggtggcctcttcaggttccatattcccaatgttgtgagtcatagataaggtcaccccattgactcttgggtgcctcctttatcccaggtctctgtcttctcctggagatggcccctacctcctcaccttggtcagttacagatttccattcattttcatggccatctagttatctctcctgtccttctccacacataatcctgatataacaccaccatcccccaattcccttcctcattccccactacctcccaggtctctccctccatctgcctcttaggactatttcattcccctttctaagtgagattcaagaatcctcacttgtaccttccttcttgtttagcttctttggtaggcaaaaagagggaaatggtgcagaatattttatcacattgtgaaccccaagactgtggactggaagatcctgtttcttgttgtggtgttgttcagtcctagcacacacctttaatccaagagctttctgtaaatgggattaaataaagtcgaccatagctcaagaggcagagcaagcatcagctgacaggaagtgaacataagaaaacacaggaagtagaaaggagttaaagatgatgtaagacagtgtgggggagcaagagcttttccttctgggacatcagaggggtaggaaaggcagttgggtgctttctctgcctctctgagctcctctctgagctagcaggctttcaccacaacgtctggctcctgagtcttgattggtaaaattcaatgtttgggtttttttttcttttctttttaaacaacaggaaaatgtgacaaggggtactccgcataggggcttgtttggctgaagtgggcagctgagtctttgttatgctctaagctggaagcagcagcagtcaggctgtgcttgactcagaatcttttggccccattctccagagttcttctgagaaaacagcccatatgaggcctgacacttgccaatgacttagcaaatggtttctccagaaatgatttacatataaccgtccttcaggaccctgaccagaagcagtgactaatggtggcttttcagagttgaggggcaggccagtaggtggagcctcagttcaccagtccttcctctggcttctggaaccttgaccttcacaagagccaaggatactagtttctggaaaattcaaagtagtgagatgcaatttgccttggggcccctcagatacaggctgcttcttgtgagactcgggcactcgcccgggggaagatgaatgaataacagggaggtggatttcctcagagaagtttctgtacaacagagggtcatggggattccatggcaactagggacgtgtgctatgaccgtgcgtgtgtatgtgcacgagagagagagagagagagagagagagagagagagagagagagagagagtttatattgcagcaaccattctagacaaggtaaggtttaccctggagccctggctctgtgggtgcgctgtggctctggacaagctggccaagtcacttcacaaagtatctattttcccagagttgaaaccaattatctctttgcaagcctactgtgcatactttgtaagcttatgggatttattttctttctgcatatgtgtgtgtgtgtgtgtatacatacacatgtgcgctctcgcacacgcgtacacacgcacacacaccacgtgttgttgtgtgttactgtgttgctaagcattcaacccaggatgccaagcatactaaacacgtgctctgcccctgagtgactctcaggctcacatttcattcatttttccaaacacccacatttgtcagacatggaacatgataggcaaaatccatgatctggtattctatcaagataccagcagacccagaccttatttcttccatgtctcagtaggggcataacttcccagaagagagaagaaaggtcctgtgagaggtaatcctcctttcgaagctaagatcatgccacacacccctcaggtctcatcgccccacagggtcacgcccatagaaacatttctgtaggcatctcatgattaaactgccgctactgactgttggttctgtttccttattctgctcagtgcctctgagtccatgattaatagtggaccaggctgggtttcctgcaggtctaaatgactcacttccattcacagtggctttagtgagctcaggatgcctaacgtttaacccttatttattatgtgcatgtgtatatatgtgtgcatgtgtcatactgcatttgtgactgggttcagtctttctaccatatgtgttctgggggggtccaactcaagttttcaggcttggcaccaaggacctttattttgagccaccttgccggttcttcccaggcctcatcaagggatgttaggatcactgactcccagcctccattttagacactagggtgataaggctcaagacggggagtgatatgatgtcaacctgggctccactaagtctccagaccctccctggggtctcctatacctctcagactgaagcctaaacttggtgccagaggccaaaggaagtatcttttgggaaacatgtgaccagcaggctgacctgactagaggagcaggaaatagacacccatctgacaaccctgagggtccaggaaaaaccatgaggcctggttctctcccacagacccaccacagtgcctaaacccctctgtgtgtcacatcttgatggacaagcaagtatcttggaagaaggggaagtccaggttctgctccagagtggtgagacctgaacctgtggtttgtgctgctgcctaaggactcagacttgggagacaacagagatcagagtcctttctatttctctcctcaaatttgcaaaagtgtcctaaaccaggtaagtatggtggtacatatctgtaatcttagcactcaggaagtaggggtggagaactacaagtagaaggttatccttggctatataatgagtttgaggccaccctgagctatttatttttattttttaaatttattattagtgttgttattattattagtgttgttgttattgttttcaagacagggtttctctgtgtagctctggctgtcctagaactcactctgtagacccggctggcctctaactcagagttccacctgcctctgcctcccaagtgttgggactaaaggaatagccaaatgcctggcttcaagactatctcaaaaggagccacacacagacacattaaaggcatggtgagcccataatctataataactgtgagttgattgcccggtgtgtgacagttcatgctaggcagaggaataagctagaatctgaatatagttccctctacactgaggagaatggcctgtataacaacagaaggttctggaacctgcactgggagactaggttatcaaaaaaacatggtggtctctgctttgcttaagtgcagtcatttccttgggagacagccaaaactcaatagctctggatactgtgacctgcccttagccataagtgtagctagaggatccatcctccagcccatctgtctgtcccttgactgcaatcccaaagggaaggaacatgaagccagagccacttccccacctcctcccgtccacccccacccattcttagcaagccctcccacattgctctccagcagaaagtgctaggccgtgaatgtgtcccacaggtttaggcacataaagtgaaggcaatggtagcacacacatgatacactccaggagaagtggtgtgcccacagtcgggggacccaaaaaagtctcctccccacgtgctctttcttttgagcaaaaaccagggtaagagaggctaagggaaggaagagaaggacaaagcttgaaccaaatctttgctctcccctgtgtggactctgggaaggtcctcagcaactctgaaccttcttttggtcacctataaaaggaacagcaggtaattcttggctgtagagcaagttcaagaccagcctgagtcacatgagaccctgtttgaaaacaaaacaaaacaaaacaaaacaaacaaagaaaaaaactcaaacaggaatccagagagacagagagacgaggggcacatttttatttttctgagggtaggttccccaaagatctaagaacctctggcttggtcctatctcttcaagaatccatcagcagcttccacactgccacactggagaccaagctgctaacacatggacctttgggacactaaatgatatcaggccttgtgttcgatgaagccctatatacggcacagctgtctgggacccagctgtgagaggggctaggcatgagcccatgaagccacctaatagagagccctgctttatcaaggttctcaaagaaaatcacttgtgggatgttgtagcttacttggtagacagcttgcctggcactcatggagtaaaaactgagtatagtgatacatgcatgtaattctagccctgcagaggtggaagcaaagggagggagcagaagttcaaggtcatgcttggccttagtgagttaaaggccaacttggggtacctgagagcctatttcaannnnnnnnnnnnnnnnnnnnnnnnnnnnnnnnnnnnnnnnnnnnnnnnnnnnnnnnnnnnnnnnnnnnnnnnnnnnnnnnnnnnnnnnnnnnnnnnnnnnnnnnnnnnnnnnnnnnnnnnnnnnnnnnnnnnnnnnnnnnnnnnnnnnnnnnnnnnnnnnnnnnnnnnnnnnnnnnnnnnnnnnnnnnnnnnnnnnnnnnnnnnnnnnnnnnnnnnnnnnnnnnnnnnnnnnnnnnnnnnnnnnnnnnnnnnnnnnnnnnnnnnnnnnnnnnnnnnnnnnnnnnnnnnnnnnnnnnnnnnnnnnnnnnnnnnnnnnnnnnnnnnnnnnnnnnnnnnnnnnnnnnnnnnnnnnnnnnnnnnnnnnnnnnnnnnnnnnnnnnnnnnnnnnnnnnnnnnnnnnnnnnnnnnnnnnnnnnnnnnnnnnnnnnnnnnnnnnnnnnnnnnnnnnnnnnnnnnnnnnnnnnnnnnnnnnnnnnnnnnnnnnnnnnnnnnnnnnnnnnnnnnnnnnnnnnnnnnnnnnnnnnnnnnnnnnnnnnnnnnnnnnnnnnnnnnnnnnnnnnnnnnnnnnnnnnnnnnnnnnnnnnnnnnnnnnnnnnnnnnnnnnnnnnnnnnnnnnnnnnnnnnnnnnnnnnnnnnnnnnnnnnnnnnnnnnnnnnnnnnnnnnnnnnnnnnnnnnnnnnnnnnnnnnnnnnnnnnnnnnnnnnnnnnnnnnnnnnnnnnnnnnntctggggacttggcttctgcagcaggtgtaggcctctgcagtcccacacagaagcctgctgctctcaaactagggacttcccctcctggtcttcaaagcactttcacacctgcttaggggttcatgaactgcctgggacctactgaaggcaccagggcctctgttctgagtcccaggagcagtcacttccatgggatgcttacctctcaccctttgcttaagatctctcccacaaactcactgcctacaaactcactgctttctctccagctaggtactcactgccatagccacctgccagatgttatcttcagtgcccccaagcactctgtttctccaagaccccacactgtcctaaggcagaaggacagcatgctacaacatggttagatcagctctagaattaaaacacaaaacaccagaaatggccttttggccaaaaagtagagggagctgcccttagagtgatggccctggggtctgagtgtagagtgtggtaggcaggaacaaaggttgagggggggatctagaaggaatgtgagagaacacagagtatgaagtgcagtggaagagactctgaatgcttttctcttggggtgatgtaaatgtgctcacaagtaggatcttcatgacatttctaagaggatttaagcttcaggcccctgtaaattcttagcacaaggtaagcagacaaaatgagcaatagtctgcagtgccaaatcaagaatacagggctggtgaggtgccctattgggtaaaagcacttgcaagagtgcctgagtgtatggagaggcaggaagcagtaaagaagccattgaaatggccatcccatggcataattaagggaaatatttttgtttgtttgtttgtttactgtgaataggagaaagaaaatatccagagacatttgaaagagtccagagtggagagaaagagaagcagactggacacggccagggtgatctgtaaaagaggtgagcgtggtaggggatggagaagggtatgggtgtagacaaatcccatagattataaggacattagctgggggaagtaaactagtgtggactttgaaatgaataacaagtactgtaaggagggactgaggaaggctggagactggcataggcaatcataggtatatgtccctggagtccatgtccctcagcctgagatacaaaatgaccccggtggagatggaactgtttcacaagatctcgaggaaaactggcttttctctaactgccagagatccttctatgatccccattataagacatatgggctgtctgagaccaaatacagaccacccactggccatcagagttcgatcctctctgaaacacgtaaaaaaacagatgagatggcaacacacttgtgatcttagtacttcttcagcaacatgggatgtcttgggccagctagcctggagtcacagtactgcagcagaaacaaaagagaccctgcctcagaacaaggcaggaaaggaaagccaactctggaaagctgtctctgaactacacccattccctgtgcattcagactcacatacatgtgtgtcacatgcacatgtatataccctaaaataattagccagttttttaaaagaataagagtctccaggcgtgaggccctttccccacccagccatagtgaacctctgccagggtctatgccaaacaaagaaacaaaggcctagggagcagaagttacctgtattgggggaggttagcagggagagacaaacttttatatgcacagtgtcttagtcagggtttctattcctgcacaaacatcatgaccaagaagcaagttggggaggaaagggtttattcagtttcacttccatactgctgttcatcaccaaaggaagtcagggctggaactcaagcagatcagaaagcaggagctgatgcagaggccatggagggatgttctttactggcttgcttcccctggcttgctcagcctgctctcttatagaacccaagactaccagcccagggatggtcccaccctcaaggggcctttcccacttgatcactactaattgagaaaatgccttacagctggatctcatggaggcatttcctcaactgaagctcctttctctgtgataactccagctgtgtcaagttgacacaaaactaaccagtacacacagtattatcactttgaatgggtgtgtaatagtccataaagtgggtgaacctcagtttccaaactcatttcctactgcaactcggagtattcccaacatttacagatacagtttaaagagacattctcgaatctatagtctttttgttgtggttgttcatttccaagttgagctgtttgttgatttttcattgtttgggttgtgaaattatggagcaatgagttgtaaactttctaaaaaattttgttcttttgcttttgctaacaaggactttttgacaaggatgctttctgagagcggttgcaccactagtcagtacagaagaatgaagttctgttttctctcgctttcccccgtaactattattatgaattaaaaaccccacaaatgacttgaaggcccagaagactaacaaaggctgctttcatttgcatgcctttggttactaggaaggttggactttcacaatgtgtgttttttatttggttcaagctggtgcaagctatttggatgctacatccgtgagtgtcttacctgcaccagttcattgtgaacacctgctgcattttgggaagcatgggctccaggttcctctgccccttcctgaccctgtgattattcgaagctggatctttcatcatcagggaggggagggtctggagtggctctatggaagtggcacattaggggtggattttccaggtaggatgtggacctcaaagaggcctatgtgtgaaatggaaagttcgtagggactttggaaaatcctgttaggaagtggcagctggtgccctgtgggaatctctaacaacactgaaggctagactaaaatgtggaagccaaaaggcccttgcatcattctgggcttgaaagaagccgctctcccatctttagagcacataggtagcatgcctgttttctcagtgttggtttttatgtttgaaaacaaagcaataccagacaaaagcagtgagcacctgctagtcagtgctcagcagtgaccatgtgctgccagtactcacagaagcaatcaagagagcctggagtccggggagccccacattcgaacagcagcttggggaatagaataaggcagacttcaggtgaggctccagggtgccagctatatccacctggcaaaaaagggcagggatacctgtggattgattaacatatgcactagtcttcacatagttcgttcactggtcagtccacccacctgcctacccatgctccatgcaggcatccactaatccatctattgctttatgcatccatttcccctttaccccatatccattcattccctcatctcatcagtcctcccatcatctacctactcatccatctacccatccatccatatatccattacctaatctcttcattcattccccaaccctcccactcacttaaccattcacagatatcttttcatccatccacccatcccttcattctgtgaccctctcatccatttaccatccgtccacttcatcactcatttgttctctattcacctaccccatctgcccatccatccttccttgcttccatccatccatccatccatccatccatccatattccaatccacgtgttctctttccactcatccatcaattcatccatcccctcatccatttatgcatttgttctcatcttcctcacccatctacccatccatccattccctcatcctcccacccacacttccatccatttgttctctattcgcccattcattccccgtgcagggctggctttactttacagcaaatgttacaatgaagaagtgctcatttttctcgaaactctcctcactctgtcccttccaaagaatcctgatgatgtgggcttagaatctcacccttcctgggggtggggaatggggctagaggcctcaggattctgtacctctcagactcctgagtcctgtacctttagagctgagccggcttcccggttcctcttcaaatccggggcggatcattcaaaacgcaggggagccccctgcgtgcgtgcgctgtggctagccctgagtcatctctgcacgtggtggccccttctctcttaggcttcacaggcaggcagatcgctgcatcacaggtggtaagagggtgggggagggaaggattagggctgaacccgaagaagggttaggaaggcgcagtcacattagaagtgatttcaccgcgggagagtcagggtgccggcaggtggccaggcgctggagactcgggaagccaagatgagcgccctactcaccgcagcagggttgctgttcctggggatgcttcaagccttcccaacggtaagggaatgacagtagccccggacagtgtgcgagagcagtggctagagtaaaggaggacaaggcaacctctcaccttattccccaactcaaactagagtgagggggcacaggaggcaactaaaatatgcaagcatccacaggtgggtggataactgaagagtaaagttagagcttctctcgtcacaaacgcaggtagtcgatagttgggagcagtttgctccttcattatccgtgagttgaacccggagcaagagaaagctgttcctttcctgttctgttactgctgccccagagggggtcctggatagagaaacttgagtatgcccttgttttgccagaggatgataacgggttgtttgtgcatccgtaggctggaagggctgaggaaagagaggagggggtgaatgagagcaaaggtgggggtctggccagctggtgatgtgggctgggtgccctggagcaagcacatggtggatatttgtcccaggagcaagtcagtgctgtctctggttctatagttgaaagccccagaaataagtctggtcaatgagttaggaaaactgaacaattcctaggggccaatgccacactaggcattagtgtgtgggaaggagacaggactttgaagagccactcagataatcttctttacggaacctaaggtctacatggaagaaaaaagtgcatggctgaatggtagctgggggagggagacaagggacagcagcaggcttgctggacatgaggtgtctctgctagagaggtgtgaagacaagggaggagagagggcaggagagagatggtaggaaggtgtccctttcatctccagtgggcagtgtgacacctgccctgcagagggcagaagtgagcagaggagccgtcctaccctacctcacccccatgcccgaagccctcattcggggaaggtaagagtttggagcaacaaggaccctggaagatgaaggaaaaagtaggatgtgaaagtggggaggtttggtttcttttctcctactaagtcgaaacattttttgatcagggcatggcacattcttacatgagtatgtaggtttaaggacaactctgggagttggttctctcctttgaccctgtgggttccaggaatagaactcaggtcatcaggtttggcagctagtgcctttacccacagaaccatctcacaggcctgtgaaaacatgttttacaattaaagccgtgtacttactactacctggaatgtgtgaaaatgcccccaaacaaaaaagtataaatgctatgatagagctaattgttttataccaatatcttctaagctgtaagcatgttcttgttttactgctatttacagcatctataaaagcatatctgtatttggatcacttttatagaaatatataggggtttctctttttatttatttatttcaattaattaattatttttcgagacaggatttctctgcgtagccctggttgtcctgagattcactcggtagagcaggatggccttgaaatcacagaggtcagcctgcttctgtctcctgagtgctgagattaaaggcatgtactaccaactgcttttttttttttttttttttttttttggacaaggtctcatgtagctcaggttggcccccagtttgctatgtagccaaggatggccttgaactggtccttctccttccacttcctgattgcttaggttgcaggtatgcactaccatatgccatgtatgcagtgtatgagattgagcttggggctttgggtgtgctaggcaagcactctaccaactggtccacatgctcagtttgtctgtgtttttgttttgagatagggtctgtgtaactcagattggtcttgaactcaccctgtaatcaaggatgtctgcaaacacctaatcttcccactggtgagtgctcagtatattacaggcatgtgccatcacacccaattttgtaatgttttgatttagcttttacagtgtctacagtaggtcttcacatccctggtgaatgagcactgagattcccaccagtgtcttctggtttgtttttataagctggagtctcactatgtagtcccagttagcctggaactcgttgtgtagaccagtctggtcttgaactgatacatctgccagcttctgcctcccaaatgctgagagtaaaggcatgcgccaccacgtggccccaacattgtcttctgtgtgtttgctgcctggggaggaagagtggttctttcctagagaagaggtaagagaatactggtggctgacagagcagatgtgcactgaaatgaaatggcatgccttccagtgtgcaagacaatgtcttttcacacaacagtgtaagacagtagcagcttcccacatcctaaccgacgctcgatcttatcaatctctattttgtggtcttgaacggactgtatccttcttatgttaatttgcatttcccagtgactgtaggctaagcatcaaacctcaagtctgtgggcctttcatgacagaacttggggtgtctgtggggaaagagctgcctgcccagcaggggtctctattcaggtccttcaagatttcttccacctttccattccagttaaggtttgaaatcttactaaaagcagaacaggataaaataatgacagcaacaaacctttttacagctggatgcatgactttaattccagcactcagcaggcagagggtggtagatctctgtgggttcagggccaatttggtctgcattacccaacactatagagagagaccctgtctccaaaacaaaaacaaagattagccaagcaaacagacacatactctgcacaatatatatatatatatatatatatattgctggttactacataactggaatcccagcacttggaaggccaaggcaacgatggtcagaagtctagagataggaccagcaagatggctcagcaggcaaaggcactctgactcttgccaccaagtctgacgtcctaagtttcatccccaagactcacatatggaaaaaaagaactaactcttggattgttctctgatctcctcaagtaggaggtagctcatgcatgagaatgcacacatatgtgcacatgtacacaaaagacatagaatatcatttttcaaaaaagttccaaggtagtctgagctatattgaaagtatatacacacacacacacacacacacacacacacacacacacacatatattttggtttgggatctcaaattctttttttcaattttttctgctttttttttctcagtttttgtcactttgtgacaagcatgttttctgaaaaagagacaggccttgtatttgtaaaattatctgggactcaggtggtacaagtccagagagacagagtttcctctgttccattcttttcttccagactccctgggatggtataaggccatgccttctggtgaattctgtggcttcagaattcccctgatatcttccccgggcatcctgcctttggctccagtctgattttcctccttcagctctggcttaacattttaaggttcctataggggaattctcatgaatgagtctttgcagcatgcagctctgctaataggctgtcactgatgaagcatgcccagtcatcttgcacagtagggctaactgtggcggtcttggtattcaacagagggcaagagaactttcttggattcctgtagaaaagtaactttcagaaccattcaaatcctgactagaggcagaattccatgggatatcccagaaacagaggaggaaaccaaaatgggaagagaggggaaaaggagactatagcttctcttaattgaaggctgccttcctcgattgaggttcacaagcaacaagggttccaaggccaaggcagggcagctgcattactcagctcgagagcagttctgttgagactaggacagcccttactggaactttcagtggtatctactcatatctgaccaaaatacttcttgagtaggagtgattcatttctaggtctgcacatactggcatccgatgcatctcaggacagaagaaaagtgttggggggggggggaccctgaggctggaggtcattgcacaggcagcttaagcccaggttggacctgtgtggtttctgttgagctgtgttctgacttgggggtggcttatctgtagttatccaagtagaagtgcccagctagacctgcagatcagacgacatttcagagaacataccagctctgtctaagggaaggatctgtcttagagaaattagcagaagagcctggctcaagaaatggtgacaaaaagaaggtggcatatatggccagcccagaatgggcaagggaggggcactgcaaggaggaggcatgcgaggagcccagttgtatagactgcagtgggttaagaccctgctctcactgggcaacctaatcagatgtcacatctgccttaataagaggagctatcaaggaagaggcaagcagcgatggggttgtggggaattttgttaggctcctggctgaatggtgggaaaagcctgagaagacacagcaagtgtttgggaggagcatacaagttctattttacccaagttcaggtctcagatggcgtattcaagtatgcatgcttcaagagagttcagcctgcagaactcgtgctgcattccagacccgcgtcgaggggcatcaactcttttcacataagctgcctacaatagcctagggctccacatatcttgatacctttcatcctattgatattttccagtccaggagtaagatctttctttctatttctcttttacacagatttttatttatttctatttcatgtgcattggcattttgcctgcacagacatctgtgtgagggtgtcaaaatccctagaactggagtttcaaacagttatgagctgtcatgtgggtgctaagaatcaaacttaggacctctggaagagcagccggtgctcttaactgctgagccaactctccagcctgagtagaatcttttgttcagcctggtgatgttttattagatccttctcactgctgtaatgaactttaacaaatttggtggccaagagtgtattgtttggtggctctaaggagtggagcgagctgaaaggaggtcacagaactgtgcttctgttacgctccagggactccttgttcttcctagttgcctcttccatcctcaacttcctcagagctctggcccacctggttgcatggtctaaagactgtggttgcattgggaatcatagaagcaagccaaacttaccaggttccacaagaattacattgatctcttcgaatacctgaaaacttcctaccaggttcctcctccctaagattagtctggccttgaacttcaaatcctcctccttccacctcctgagttctaggatcacaggcatgcgtcactattccagatatctctttattgttacagttgtttatttgtgcacatgtctgtgtgaatatgcatgccaggatgtgcatgtagaggtcggaagacaacttgcaggaattggttctctccctccttccaccgtatgagtcctgggggctcaaagtcttcaagcttagaggctttaactactgaggatttcactagtgcagagatcatatgaaccctgcaatgggaaatccttcaagtgtcagctctgtctaatgtcacaagcccttccagcgaagagcttagagagtatgtggaagaaaggatgtgtgtgaggatttggccctccattgctggcattgcaaatggaagacgtggcctagtggtatgttcttgttattgtaactaaacacacaaggccaagtgcttcaaagaggtttcatttggggctgacaagatgattcagtgggtgaaagtgtttatcacacaggcctgatgccctggagtttgagcccctgaactcatgtaagaacaccaatgtagaagcagcatacaactataattccagatgagaagggaggtggggataggtgactacgtagcagaaacaatgaaagactctgctctaagatggaaggtgaaagcaaggaactgatacctggatattgtcttctgacctccacaagtgtgcactgtggcatgtgtgtgacacacagacatacatatacacacagagagcaagtgcgctcgcacgtgcgagcacacacgcagagcacatagaagcaccatcatcatcatcaacaacaacaacaacagtattttaaatttttagaaaagaggtttatttgactcctgattgtggggcctggagagtctagacagtgtggtgcccagtgttctgtggcacaggaattctcagacctgtggttttaaagatccctatgataggggatggagcgctgcttcagtggttagcagcacccgttgctctttcagaggaccagcatctaattcccagcacccacatggttgttcataaccactcataactcaaattctaggggatccaatgcccttttctaacctccatgggcaccaagcacccatgtggtgcacatattacatacagtcaaagcactcacacataaaagaaaatgaacatatctaaagaagaagaaaaaagcttttggtggtagcccgatctagtggtacaggcctgtaattccagctagtcaagagactgaggcaggaggatcataacttgcctggaaattttagtgagaccttctaaataaaaacagaggcactaaggcagcgtaggcagagtgcttgtctagtatgcaccagggagttggttcttctcaagtaccagagaacacaaagccaataaaacaaggacctttcagatctggagagatagatctgctgttaaaaggcttgactcagaacccaaaacaaaggcctttctggtgtcagtagtgtgaatgggatgcggggacagggtaagtatgaggtcaccctgagagaacaggaaggtgaggaagaactggtggattcggggaataaaactacagtttaggcagaggcagctacaggtgacttagtccctttatgggactaagaaagctagggccttccccccagcctcctcccctgcccccacacacacacttggggctccctctgtggggctctgagtgacaggctcccattgctaccctgggcatccagaagatagtgcaggctgtgaacttacacagaattttagaaaagagtccccaattattctagtgccatggttctctatgtccagctactcggaaggctggggcctgagaaacattttgtaaccagccttggctacatagcatgacccagtgtcaacaaagcaaagccaaacaaacagcctgcattctaatttaccagttattcaaatattatccattagagtgatctccctcacattcctcagcagcctataattcagacactgaagttggttggttggttggttggttagttggttggttggttggttggctggtttaatggtgctggggattaagcccatggcctcatcctaggcaagcatactaccactgaactatatccccagtcctctactgtctccccaccctccaagttcttttgagataaactcttaccctctttccaccttaccagccaggtacccaggatggacttgaatttgtcttgcctctatctcctgagtgctggaactatatgcactgacttaaaaaaacaaaacaaaaaaaaaaaaaaaaccaaaaaaccttttgagacagggtctcaggtatcctatatacagttgagggagaccttgaccccttaatcttacagcctctgcctcctgagagatagattccaggtatgtgccagcatgatttgttctgagctgacattttcattattatttatatgaggttggtgttttaaactctgttcctcccactctttaattgctgagccatctcttcagtttctgtactgacatttaaaaatgggtaaattgtagaaagtcccttaatttgggctcatgatttgatatggagtatgggggacatgttgtcctctccagtacactggactttttaaagtcctgtggctgagatggggagggggagaaatggagacaaggtacagttcaaatctccaatttacatttggttgctgtgtgagtttaggcaaacagctgtgcctctctggacttcagtttctttatctataaagcaggagttggctgaaagtaggctggctttggagaagtgatgcagggtaccatataccttcacctgccctgggtggaacagcaggaatgtaagcagacagatggttctcagatggttcagggacagggcaatgctgcctcatgctctttagctatcagtgagacgatggggcaggccaggagggaaaacccagggcaaggacataaaattttcccatactctgaaggccccaaggggctgagtcctcacagctccagctagctctgcctcaggtttctgtacacacgcagggaggggcccatcagggaactgcagcttgtgcgcgctgggttgctacctgggagggttctaggagccccctagccccacccctgtgacttaagaaataaaagcttcttcaagggacctgcaaaagagagagagagagagagagagagagagagagagagagagagagagagagagagagagagaaggagggaggggggagggagannnnnnnnnnnnnnnnnnnnnnnnnnnnnnnnnnnnnggagagagagagagagagagagagagagagagagagagagagagagaacgaacagaggcagcctgtgcctcccgactgtgctgtgtgaatgtctcagtgttcttagctgcagcagtcagaaccaggtatcatacatactaggcaagcactctaccactcagctacaacccagcccctaaaccttaggttatatttatcatttcaagttaacaaggtgacatgatttcagaagtgtcaaaaaaaaaaaagtatagttagcacccacacacccaccttccagcaccactaagcttggtgtagctctctgaagtttccacaaataaatacaacaccccaccctacccccatttgcatcccaggctggccttgaattcatgtgtagccaaggcaacaaatacaacaccccaccctacccccatttgcatcccaggctggccttgaattcatatgtagccaaggcaacaaatacaacaccccaccctacccctatttgcatcccaggctggccttgaattcatgtgtagccaaggcaacaaatacaacaccccaccctacccccatttgcatcccaggctggccttgaatccatatgtagccaaggcaagtgtgatggcggatcttggttgtatccttgacacatctaggaagagggaagcttggtggatgaattgtctcccattagtttgacccatggcatatatgggtggggcattttcatgttggctaattgatgcaggaaggctcactttggaggtgccatccctgagcaagagggtcttgtcggtataaagaaagaggcagccaccgtgagcctggggaaaagccagtaagcagtgcctcctccatggtcaatgtgttagtttctaccctgacttttcccaatgatgggcttgtctcctaggtgattctaggtcctgttaagttgaaaatcaatgttaaccgtgacaaagcttgtgagacgctggacgtggggaaatagaaggagtgggagagatgacctgcgtctcgccagaactcgggggcactgggcgggcagacttgggtgattgccgtgggatcccatggaaccgtggctggatgggcgtcaggccgccaaactcccctctggtgggtagggaaaacataatctgggggttctcagtcttggataccccagaacaccgctgaatgtcttggaagagctgagaacgaagtgggggcaccaggggctgctcagtcagctccaaggccaaagggagaaaggggtaggggggcgaggaaaggtgctgggtggtttctgcaggggcaagagtccttgttccggtctggcagctggaaacgctgggaggccttcctacgggcgattagacgtggttctttaggggaaagcctattccattgctccagcatggcgggtcctgatgagcagtgatggtccatgtaaaaactttattgtagaaaagcagagagagagagaagagtaaagaagcagagggcggccgtgcccctgtggagaggggggtgggggagggagagaaggagagtgagaggtgagagtaagagaggcaagagcctcaggtaactgtgggggtggaatctagccagaataccatgagcttgggcattgcttgtgtgactgataacctcaggattatggagttgagggctcatggtgtcaggagcctaatgtctgggagcatagcttacagttctgtcccttgtagaattttctactgggtctccagaacacagactgcctttcacagtccaacaaaagccctcccagtggggcttacagttgaaagaacactagaaagctgcaggactttcttcccaataataagtgaggctggtattagtcatgagagaaatgcaaagaaaccataccacaagctatcactgcaccacaccaccccacccccaccaaagctactgcatctttaaaaagcagcattgatacccaacgcacgttggcaaccatcatgcatcggttagtgccaacaacaatgcaggacagatggcagcctcgaacattgcagctaaatgatcagtgcaagggcttgggggaggggggggagcactggatggagagcaaggctaggagtgtggctcagttggcagagtgcttgcctagcatgcctggagccctggattccagccacagcttaaaactgggtgtagtggcacatgcctagaatcccagcacttgggaggtagaaggaccaggagttcaaggttatgcttggctattagttgagtttgaggccagcctcatctatatgaaagtcttgtctagaaaagaagaggggaggggagagaggaagaaaattagatgatggtctatcagagctggcacttaattcactatagctgtgtttggaaattgctacataggctagcacatgcctttaatcccagaactcaggttccaggggacctgacaccctcacacagatatatatatacaggccaaacacattattttcttttttgtttcgttttgagacagggcctcaaggtatagccctggctgtcctggccttggactcacaaagatcagcctgtctctgccttccaagggctgagagtaaagtgtgtgccacaataacccccaccccaaaaaataaaacagactgagcagtttgacctatgtcaaattcaagagcagacagaattaattaatagacatggcgatgggttcatgttttgtttccagagagggaatctgagtatgctgggcgtgggcaaggtcctgcctgtgtctcgggatctgggcacttttccatctgggtatgcaggatttcagctcatacaaaactttaccaggtgtttttattgctgcagttgtcccagagacatggtgggaggcttgtcagtcccctggaggagaacactggtgggaccagctgctgctatggttgatagcttgaaggtatctgagagaactaactggctgagaggaggggtgcaggggggacctgtgaacagaggagggtatggagactcttgggtgtcccatttgcatctaagctgtcgttgtttctgcggggagatgaggagtcaggaatttctcctgatctctaggacggtaggtctcagccttgacagtgagcggataccaagtggggactgcagggtggaattaagggtggaagtctggccttatttcaccagcttctctgaccctccaggatcgaccactcaagaccacctgtgccggagacctcagccactacccaggggaggctgccaggaactgctgttaccagtgcccctcaggtgagtatgggataccaaaggcaagaggtagattgttttagtatatgatattcatggaggaactggagaaaagcaggagttgaggagggatggatagaaggtaacaaagataatcatgatcatggttagctacaggtttccaaaggccatctctaatgtcacagggtctggggaagggcaaggctgccttctgggaagactaggtctgctgctgccacaaggatgcaagaccttctcaccctcctcctccatcattttatgagtattttgcctggatttatgtattgtatgcatgcaagctcttgcatagattaaaagagggtgtcagatcccctggaactagagttacaggtggttatgagctgccatctgagtgctggggcttgaaactgggttctctttcaagggaagcaatgaacctgctgccctacctcagtatcaatcgagctgggactgcaggactatactacctcaccctgacctttacagttcatgtctgctccaagccagcacatgtgttcgtcccaggctgccctgggctgcaacttctgtgggacagagcttgcctaaccactgctggcttcctggaatgctcccccacccctagtacagtgtgagttctagaagaatttcaggaaatccatctggaacaatcttcaggcctgaagattagaaaaggggttatgagcctttttgatcccctgtgactatgatcaaaagtctcaagcacatgccgggggttcattggtggctggggtaggagatgcagctgtggtgctgtctctgagatccgggaatagacgtctgcttgaaagaaacattagctatgacagttgagggtgggaggaagtctctgtcactggctcagtgtatctggcccctgcttttaggacagcatcagaggtaggtcaccatgtctggagggcttcctgtgggtgagaagtagtaggcccatgtacccaatattaatgcttcccaggcacaatgtctggaggtgggtgcaggtagtactgtacaaggtcatagaggatgtgactatagctaggtgagatgcttggacaactgcttagccctgtgttctctgatggagcagtcttgcacgggttaccagatgatgtatctgagaaagaacttaataacgtctattcccaaaaatgattttaaaatatttctgtggaccttgagagatggctcagtggttaagagcacttcctgttcttccaaagaacccaggttcagttcccaacaacctcattaggcagttcacaactgcctgtgaacttcagctccagggaatctgacacctctgaggacacacatacacacacacacacacacacacacacacacacacacgacatacactcataaacacacatatacataaagaaaactatttgagctgggtggtggtggagcaagcctttaatcccagccagagccaagtggatttctgtgagcttgaagccagcctgatctacagagtgagttccaggacagccagggctacacagagaaaccctgtctcccaaaacaaaataaaacaaaacaaaacaaaacagccaaacaacaagaacaaaattaaatgttcctgtgatgatcctttgatgacagcttgacaggatcccatgtagcctaagctgcctttgaactttgtggcagcgaatgctggccttgaactcctgatcctcttgcttctcgccctctcccagtgctgggattaattacaggcctgtgctaccataccgagcttcttttgggttccttcctgccccctacttgcctcccaatccagctcattctcttccctgttcctctttggggtcctgcagaccattgctttcccctagttagaaactggaggacccaaggacaaggttctgtcctgattaggtttctgtccagagctcttcctggcttacagactgaccgtaccacccttctatggtgtgtactcctttttcatagagacccactcatcccatgggtttagggcttctggtgggctcctttatccatagtgagctcccaaacctctgtctctccaaattaaagttaagggtttcattatgaattgggggtggggagtggggcgtgtgagcaattctagtccacagtggtctcctcccacctccccatcctctcatctagtcctgctcctcatctattccctccacccacccacccacccacccttcaatccaatggcaagatcactcttggaagaggtcatttcttccagctcctcccgtttttttttttttttttcaggcctctggtcctttggtgctgtctgtttcctttacccctgcgtgtccctttctgctatctccatcctattgcagctctgagacactacctctacgagccttcctttgctgcaagggactggcttcctgcatttctgttctggtcggtttttgcccttctgtccacagagaggtgtggccacagtgctatgacgttctgaagccacagttccagtcagagagagaaagacacttgtgagcatgacccccaggtcttaggctttctccacttaacagctgggacttacagacaggggctggtccctcctctcacttcctctaaggctcagtgctgaaagtggctgagcacctcaggtctttgtggtgggcggggcgttttgctggagttttattgaccctgtgcttccggacaagccacagaggaaaaccagaaaaaccccttcttccgtgttttggggaaatttctgacattttgcccgccctctcaaatcagcgctcaactatgtggcagggtttgcacgtgggtggtctggtagaggaagctggaagacctttgaatttgagaggctgagaggtcttctcctgtctgtcctcacctaggaggggtgccttgccacctgctgacagtcacttcccagttctctgctgacatacctgtggtgacaactcactgcctgcatcataaaatgaccaacagcacttatgattcaggccactacaaaggaggcctggctctttccccacagtagcacataaacctcataggaagccagagaaggaacttgaacacggtccacaatcacctgagctcaaccctgagctccttcagccttccttggtgttctggaccccaggccttgttcagggttgggatggtgaaggccctggtgtctctccagcttctattcatgagtcagaagaacataggttcaccaaatatgatccaggccctgcaacaggagactcaatgattgctgtaaacagagatagccatcctgaagagtgtgggagtatttcaggtagataaatttagatactgaaatttaactccccagtcgtgacgaaaggaatatgccaccaagccagatttcatcaattttaaccagaaattcagtagaaaaagccagaccatccatcttgaaaaacgctcaagggatggggcttatcggttggtggtctgatggtcatgtgcccatgttgagccaatcacaatggtgagaaagataacacgttctgattggtctgttggagtcacatgcctattctgaggcgatgatggagaaaaatgaaatgttctgattagcccacctcggtcatgtgcttaacctgtggtgaagcagtgggaaacatacgtgactgaacaaacatgacaggctctggcagaacagatagaacctggcagatatcatgtaccctttgcctccgtcatcatcctgcatctcctgtcctctaagtttgggaggaagattgctgggtggttccagggcctctcagtcagcttgaatcagtatcttcatggccttaactccccatagtccccccagttccctcagagaatcaggacctctgctgagagtgacagccagcactcagactatacttgctgaacttcaccgacgcttcacccttgtccactctaggagaaacagatcatattgtcactatgagtgaggtcgctgcaattgtccatggtcacggattgtcagttggcaggccaggaatgccagatcttccccattcttgggctgcctatttgttcccagtgacctccatcgaggtccatgcctccgtctgtaacacaagcattatctgatgcaaccgcttaaagcagagatgaatgggatttaggtatgagaaatggagggtggaaggccagcctgttaccaagacaacctagcctagaacttccctgctgctttccccagggttgtctccgacacagccatgcccacggggtcctgcccactgcaggaagcagtgtgcacctgactactacgtcaatgaagacgggaagtgcacagcctgcgtgacctgtttgccaggtgagaacctattctctctccctggaacgtgtctctccaggggtgggggatgcgcagaatctgagaggcaggaagtatcaagatctgatctcctggtgcttctatttacctatctggatttgaagattgatatcagcagccatcttttgcatccatacttttcagaaagatgcagtgtgctccctggagggagaacgggcatcatcacaatgcccccatgaaggacccttttctcaacccatttctatagtgaagaatctgaggattcataatgtgaagggccttcctggagcagtccgagcagtgccctggcatcaagagctgcattctttctaacaaagaaggtgatgcttccaggagagttcttgaaataggttcttctaatattaattgcttgtgcttagtgatagtgtctggcattttcttttggttttgtgtggatggttaggttgaaagacatgttgagattgttctcaaaacctaataatcatattttatcaaagctttcagtgccttttttataatgtgtattttgtttattgcatgcaaagatttttctaaagattgtattttcttcctaattgtgagtgtgtgtgtgtgcgcgcatgcgtccttctgtctccatgtcctgggtactgggatcacaggtgtgcactgcaatgcctagtttatgcaatgctgaggatagtactcaggactttgatcatgcaaggcaagcaatactcttagctactgagccatctctccaaaccccacccccatctttttaagcatgggttctggagatgaagctcaagtcctatgctttcacagaaagtggtttatcccacagccatctccctcagaggagaccatttagtagtcagactccaatacagaagatgagctagtgtggctatgtattgctgagttcctgcctcatcgtgattcagctgggatgcccatcatatgggatttgaccatagacggtgtatctgtgcccagaacatacagtgcacttcctaaaactcctcatgcttctatagtttatctttccatcctcctcaccgtggcaaccactgatggctctcctgcctgtacagttaaaacatcagtcttgctggaggtccatgaaaatcacagtgtaatgccttttcagaatggcctgtcacacagttacgtgtacttcagttctttccatatcctgggacatcatatatatgcatggagtgtgtgtgtctgtgtgtctgtgtttgtgtgtgtcagtgtcggctgatgtcaggagtcttcctcagtcattctccaacttcctatttgagacggagactctctcagaacctggagctcactgattcagctacattggctggctagccagccctaggagtcttcccatttctgtagcagtcatatagggtcctctcagttcagttttttacatgggccctagagatataaactcaggactttctgctctaagaacaactgcttttacccactaagccgtctccctagccccacatttatttgtttgtaatctatgtagtagtagcagacatatgggctggaagtgaaggttaccctcacgctgcccctttcatgcacatcaggagaactgaggagaggcacagagtgacagccaactggtctgacagagggtcatgtggcatcttaccttcatcctggattgtccctgtgtacactggacccccacccttggctcccctctttcccttccatgaccctctctgtgtccctcaggccttgtggagaaggctccgtgttccgggaactctcctcgaatctgtgagtgtcagcctggcatgcactgctgcacaccagcagtcaattcctgcgcccgctgcaaactccactgttctggagaggaggttgtcaagtctccaggtgagtgtcccacagctcccacagctcccacagctccttagtagctactgttgtgcccgccacaggcctcctaaccttcccaccactgtaggataaacaggtcgaagcttctctccccatgctgtgatgtgtgcagcatccatccggggtttctgctgttcactgctcacatctgcgtcctgtcagaggtactctactggcagaggcccacgcctggttaaaggaggctgtgggcccatttgaagcttggggtcagggacgattctccggtggtccacaagtaagtaggaagcctcaagtctctaccctgggagttatctgacaaattagagctaccttccctgcgtcagaataggacattttattggagagaggagtactgagacattaggcaacagattaaaggcagagaaattactttgctttgtttttttcccccagtttgcctcgtgacatcaggccttaccatctcccgtttctaattttttgacaatacaagggaggaggagttcatggtcagaggaagagataagaatcatggaacttcactggttgccattagaagtggtgttttggaggctaggctgattccatagtgagactctgttctcaaaaaaggaggtggtggtgtgctttctagaagggggacatggaggtgggggtgcaaaaaggacagtacaatcacataaactcctggtggggcaaacagatggtgaggggtgaaaattgcaaacccttttctctaaccggtgtccttggcttttctggctcctagcttcatgggctttttccaagttcctgaatcacagaatgctctctgtactgtgggaccctgtctgcaatcagcagcgtagctgagggctgggctatattgaagattttcacctgtggatagggccagttcctctaactctttctccttgctcatatgatgaggagatgttacttaaaggcttccgtgtttgtctgtcagacagattctcaaccttccagctagcatggctaggctgtctgggcagagttcccaagactgccacatgggggcaacagaggcctgtctctgaagtcctgccattgccatgtgtaaaaaaaaaaaaatgcttaaaatgtggcaggtctaagttaatatgttctgtctataatgctcagtaagtttcaaagacctaccatgtaagcgagaatacaatgtatctttttatatttatattggttaccaactgacatagatcattatgttgttagattatttctttctgagacccactctcattttgtagcccaggatgtcttgtaagtcactatgcggcaagactggcttcaaaaccacagtaatccccctgtctcatcctcccaagtgtgggtattaaatgtgtgagctgtgtgtgcatgtgtgtatgcatgcatggacatacgagtgtgtgtgtgtgtgtgtgtgtgtgtgactgaactcaaggccattcatgtcatacaaggactataccaataagcaatactcctagcacaaagacatcattaaaattatttatttctttatttatcttttgagacagagtcattctgttgcccaggttggatttgaacttctgatcttgcttcctcagactcctgactgctgggattacaggcatgtgccactacacccagattcatttttatttttcgatttatttattttatgtatatgggtgttttacctgcacgtatgtctgtgtaccacatgcatgcctagtgcccacagaggcaagaagaggttatcggatttcttagaattggaattatagaaggttgtgagctggggattgaatcccatcctctgaaaaagtatccagtgatcttaactactaagaccacatccctccttttattgagacagggtctcattatgtagctgttggctgacctggaactcactaagtagaccaggctgacctgaaactcacagaactgttcacttctcaagtcctgggcttaaaggtgtgcggtactggcatagtgacacagcacattctgtcagtggccctgccacagtcacctgaccttgttcatctctggagcccctgtggactctcccagaaggcagctctgggagatgtaggatttccggttgtgaaaggggagagtaacttctgtttcagcatagctcacagatagccaaacactcaaggctattatggactttcttcgcaagcatcgcgtgtgtgcagagcagattccatcagctcctttctgtaggtagggagtttgacacccagagatggcagatgagcagcccaagaacgtagagccaggattgggtgctcagctgagctgcgtcaacttcatcgcactgctgaccttgctgtgttcacctccactgaagtagttggggcatcttccaactcatgtgggtcactccctccctcggagatgagattggcgttggggtgtgagaaagtacagtacaggcagtaaggttgagcgcttactgtttattacctagtatgacagacttgttttcatgtggttgtttatataaacagcagcctaatgaagactgttatgatctacttgactgcctggcttagtaagaatgtggtagagatggagggcannnnnnnnnnnnnnnnnnnnnctgtttgtgtctgtgtgtgtgtgtgtgtgtatatgtgtatgtgtgtctgtgtgtgtgtgtgtgtgtgcacctgtgtgtgtcagtgtgtatttatttgtgcacgtttgtgcttgtgtctgtgtgtgaatgtgttgtgtgtgtctgtgtgtgtctgtgtgtgtgtctgtgtgtgtctgtgtgtgtgtgcctgtgtgtgtcagtgtgtatttatttgtgtatgtttgtgcttgtgtctgtgtgtgtgtctgtgtgtgtgtctctgtctgtgtgtgtctgtgtctgtgtgtgtgtcagtgtgtatttatttgtgtatgtttgtgcttgtgtctgtgtgtatctctctatgtgtctctatgtgtatgtgtctctgtgtatgtttatgtgtgtgtgtatctgtgtctatgtgtgcctgtgtgtctttctgtgtgtatatgtctcttgtgtgtgtgtctgtgtatgtatttgagtatgtctttgcgtgtatctctatatgtatctgtgtgtgtctctttgtgtgtgtgtgtgtatctgtgtctatttgtgcctgtcttgtgtgtctgtgtgtgtctctctctgtgggtgtgtctgtgtgtttactgtgtgtgtgtctatgtgtatgcatctctgtgtgtgttactgtgtatgtctctctctgtgtctctgtatatatgtatctctatatatgtatctctggggggcacaaatataattatgtgtctgtctgtctctgtctgtgtgtctgtctgtctgtctgtctgtctgtctgtctgtgtttctgtagctgagtgtgaacatctgtgagcgtcactgaccaagccaagtgaagggatagatcctcctcactccagagtgaacagatactgggaaagccagaatctctgtctcggggtagccattgtgtcctcctagtaccttgtccatgattctacatgtggtggtgacacttctgctcctggggactctgagtttctcagtgcctgttctgaagacattgctgtctcttttataggcacagcaaagaaggacactatctgtgagctgccttcctcgggatctggtcccaattgctccaatccgggtgaccgcaagacacttactaggtgactcctgtcctcctttctgttcctctccaggtgatcttggatggggctactctgtcccatgacacacagggtgcacaggcaggatcagcccaggctcgcaggaccctagggtggctctctgacaagctcaccagttatatgagtccctgctgtgtgtgtctagctctgcctgatgcccataagagacccaggtctaagaaacttggctcttgctctcagatcatagcagggcacataggggctgagacaggagcctttctccatagacactaatccccaaacccagacctcctggtttgtgaagacatcagacctttgtctggcttcttctacagccatgccactcctcgggccatgcctactctagaatccccagccaatgacagtgcaaagagcttgctgccaatgcgggtcaccaaccttgtgnnnnnnnnnnnnnnnnnnnnnnnnnnnnnnnnnnnnnnnnnnnnnnnnnnnnnnnnnnnnnnnnnnnnnnnnnnnnnnnnnnnnnnnnnnnnnnnnnnnnnnnnnnnnnnnnnnnnnnnnnnnnnnnnnnnnnnnnnnnnnnnnnnnnnnnnnnnnnnnnnnnnnnnnnnnnnnnnnnnnnnnnnnnnnnnnnnnnnnnnnnnnnnnnnnnnnnnnnnnnnnnnnnnnnnnnnnnnnnnnnnnnnnnnnnnnnnnnnnnnnnnnnnnnnnnnnnnnnnnnnnnnnnnnnnnnnnnnnnnnnnnnnnnnnnnnnnnnnnnnnnnnnnnnnnnnnnnnnnnnnnnnnnnnnnnnnnnnnnnnnnnnnnnnnnnnnnnnnnnnnnnnnnnnnnnnnnnnnnnnnnnnnnnnnnnnnnnnnnnnnnnnnnnnnnnnnnnnnnnnnnnnnnnnnnnnnnnnnnnntcctttttagttctcagttggggagatttttgtctatagctgcttggttctgaggcagctcatctccacaggcgttgctcacctcatggtggccaggatgcacaaagaggcaaaggagaggtagggactttttcacggacgtactcctgatgacctttctcccttcctctgggctccaggttctgaagctccactgcctctcagtagcatgatggatgtctgggatacagtagcatgatgggtggctgggatacagtggcatgatgggtggctgggatacagtagcatgatagatagctgggatacagtggcatgatggatggctgggatacagtagcatgatgggtggctgggatacagtggcatgatggatggctgggatacagtggcatgatgggtggctgggatacagtagcatgatggatggctgggatacagtggcatgatgggtggctgggatacagtaacatgatagatagctgggatacagtagcatgatgggtggctgggatacagtagcatgatgggtggctgggatacagtggcatgatgggtggctgggatacagtagcatgatagatagctgggatacagtagcatgatgggtggctgggatacagtagcatgatgggtggctgggatacagtggcatgatgggtggctgggatacagtagcatgatagatagctgggatacagtagcatgatgggtggctgggatacagtagcatgatgggtggctgggatacagtggcatgatgggtggctgggatacagtagcatgatgggtggctgggatacagtagcatgatgggtggctgggatatttaccagagttccttttctctctttgatatgtgtacatacttgtgtgcaggcatgcttgcgcgcatacatgacacatgtaccatggggtcagacgacgacctgtgggtattgattagttggttctcttcttccacaatgtgggtcccaggatccaactaaggtcatcaccttagtcacctaaggtctttcctgctgagccatcttgctgccctttaagcttcttctaaataaaaagcagaagctgcttttggaaccctgccgcagaccctcttgggtcccttgtctgtgtagaatgggtttctagttgcagatgggcaaggagtcagagaatgacagacagacgcaacgcaagaggttgtgtagaatctgaatgtaatttttcaaattgagcatcaaactatttatacagaagaaaatagggaagttaggtgacacatcggcaaggtacaaatgaggttaccggatgcttaatgactcttacacaaaacagaggaatgtaaacaaaaggactggcaggaactgggcaataaaacaactgagacaaagtcagctctatctaaagtcaactctatctaaggtcatagtcttagaagccaggtgtgaggtctttacactcctagggcaagggctttcacacccaagttatggttctaattagggagttccgctctagctaaccttctcatgaataatgcaatactctaaaacaacagcctgatctacttcctaaaccattgtaaattcctgtatatgggagcgacttggattttatcctaagtgatagtgtgaggggactttctactaataagtaatgtagtctgccatatataactataataagaattctaaacttacattgctaagcttgccctgagatttctaactctatgtagtagatagtaaagcctgatttctttcactatctctcttacaatactagaggcaattctgaatgtcactgaataggcaacattcttactgaattcctactgaattccaagtttgtcatcttcaagaattttctgggacgttggaacactggcgaaggcttagctatgtcagaattcaatcttaaaaggcacttataataaaataatactaaaagagagcacgtggatccatacaccagactaacacggggatagggtatcagtatacgggttatgagagtaaccgttgccagagttccaggaggtgagtttccgtgaaactctttgcctcgtgagtgcttccaggcctctcagcctgccaagcagacttcactggagcgtgcatagcagaacccatggtaccatagcctctccagtttgatgctttaaagcacaaccctcatggcctttgtcacttgtagccaggaattgtgtgttatggaagactcccactcactactttccactacctcccaactgcctcccactgttccccactgcagactggatattcaaactctctgcactgattctaatatgtcatcatacctataggtaatgcagagaagaatatgaccttggagcttccatctccagggacactccctgacatcagcacctcagaaaacagcaaggagcctgcaaggtgactcctagtccccccaccccatgggaagggcagaatggccctttgtatgctcaggcagtgtccaggaaagtaagggctagacatgcaggggcatcagaccttgaggcctttggggaggttggggaggaacatggctgtgtgtctgtctcagtgattacaggattgtaaagccagagggtctagagcttaatcaatacctcacaatgcctgtaaagactgtgttgatcttttgggtacccaggcttcatctttaccctctgtagagaagaaacatccttcattagacacaccctttttacatggcaactgtgaccatcacccttgtccttggtttcctttggtatagtaccgcctccaccctaagccttgtggtagatgcctggaccagcagcaggatgcagcccacctctccattgtccacgggaacaccatttctggatccaggtaatgatcattcactgtccaaagcaaggggcagcaggacttcctttcagggctttggcctcgggtggattgagaaataaagaccaagcccaactttctggcttctagaactgaccctgtggctctgccgtttcctaatattatctcattcttgggacagaacttttcttttttcatgacttcattctgatgacctataattgctacccaaaattcagttttgaggctgggggtgtggctctgttggctgaattttcacctagaatacccagcacctctgggtctgatccctaccagggtatccacggggcttcgtagtgtatgtctataatctcacggctgagaggtagatataggaaaagttcagggttggatcaatgaagtggctcatttgccatctgccctgcccaaggaagcaagcccaatgaactcagtttgatcctgagaaaccatgtagaggcggaaggacaaaacaaaaggctctaggcatggcagatgcttggtctacatgtcaggttcaaggtcagtcagggctacatagtgagaccctgtctcatggttgttaaaggtcacattctgctatataacaagttgaaggccaccctgggctatatgagaccctatttgaaaagaactctcacttggggtagtggtacatgcctttaattctagaatttgggaggcagaagcaggtggatctctgtgagttcagggctagcctagcctacagagtgaactctaggacagccaggactacacagagaaactctgtcttgaaaatccaaaaaggggggaaaaatagaaaggagaaagaaattgaataagttactaaaagtctaggaagcttaattcccttcatcctcagtttccttggatataaaatggatagcaaatcagcccccaggattatcagcctatagcacaagtatggtcttcacattaccagagcaggatcaagacagttgctgctcctgctaatgaggtaacaccaggcagttttaggactagcagtactagttttggacacacggtggcaatagttctcaagttaacagttctcagcatgccatagaaaactctttgagggctgtggctatggcttagttggcaaagtgcttgcctagcacaccaaagagccttggttccattcccaggcccacataaaccggtgtggtaatacatgcctataatctgagcacagaggaggtggaggtaggtaatcctgagaacacagtcatcattggctacacagcaagtttgaagctaccctgaattactgtcccaataataacaaacaaaacaaacatacttgagcaataacacccaaggcatgtacccacataacaattaaacaattaaaataatcagtgtaggctgtgtaagggtgggtcgagtaaatgcacgggctaggcaaggtttagtatacattgaagtttagtatacatgaagtttagtatgcattaggtttagtatgcattaggttctgtgtttgattcatgttacgctgtgtgcatgtgccagtgtgtgtgcaaagaatatgaaagctgaagttacctggcctgagtggtgactctaggggtgactttggacaagatttagtcttcctcctttggctctaaaatatattcattcattcctatgtatatgatgttagtgccccaatgccatggttcgtgtctgaaagttagagggcagtttctgcgggcttctttccttccacttttctgtgggttctggacattgaactcaggtcatcaggcttgcagtaagtactttacccactaaccatcccactggccctttttgttttaatggctgaaaatgctttgtgcagagctgaccttgtgtctgccctcgggagctgatggtctcagtttccctaaccagccttcactctccccatctcaactagctacagcactccaacttctagagttttgttttgttgttgtccttttgtctgttgttgttgttgttttatatgaagtctcactatgtagccctgactagcctggatctaggtatgtagatcaggctaactggtttacctccatctccctagtgatgagattacagtcatgtaacactatacccaacccattctaattcttttattttttcttcttcaaatatgagtacactgtagctgtctttagacacacaccagaggtgtgcatcagatcttattacagatggttgtgagccaccgtatggttgctgagaattgaaccactgagccatgccatctctccagccaccactccccccccccccccgccccattctgattcttgatgtctcgatttctcatcctctctggtttctttttcttactttctgagctgccatatagcttcctggagccaggttggggtggcaaggtaagggctgaatcagatggtcccagattcgggaaggttcagggctgctcatctcagtgggacccatgtcccaggaaaagtaggaagtgggctgcacctaggactgtcctgtgtagtccagggaagggccctggctcctagctgtgcacagagtacaggatggatgacactgtgtttcagggcccgtgctcttctgggtggccatggtggtgctactggttggctccggctcctttctcctgtgttactggaaggcctgtaggaggcggttccagcagagtaagtgcatgtgtcttggggtcctggggaaggtggctgcattaatctggcctggcctgggtactgctctgtctttccttttcctacctgctcacaccctaagccccaagcctgctgtttttgcagagtttcacctggactacctagtgcagaccttccagcccaagatggagcagacaggtgagtattgggacatgcgaagggctgtctgggccagaatggataggtacatgaccagtgtagggcctggggcctagaccaactcatacaaaaacaaaaacccaaaaaaaaaaaaaaaaaaaaaaaaagccattgtccagcaaggggtgttttgagttggagaagtttcataagtacatgctcgtacctcctaagcgctccccaagcaaggggttttttgtgttttgatggtttcaagcttgtttccatgagctgttgggcagggtttattgaaaccgctgtttgctttcttgacatttttctagtattagagtttccattgccgtcagttaattttttttttgtttctctccaaatgttcatgagaacagtcttgttagaatgagagaaacagagagagaaagagacagagacagagagagacagagagagagtgtatccaaagagtctatctaggccttaagactggcctcagtattgtgtctgaggctagttttggacctctagattcccctgggtcccttgatgtttttttgtttccagggttgagtgagaggaagtgctcacctgggtgagcacacagggtccagataactatattctaggcaaggatagtcatgacctgggcagcgtgggcctgagcaaggtagacatgacctgagcagggtaggtgtgacctgggcagagttggcataacttggatagagtgggtatagtctgggcagggtgggtatggcctgggcagaattatcttgaacagggtaggcatggcctgggcagaattatcttgaacagggtaggcatggcctgggcagggttggcatagcctgagtagagtggatatgatctgaataaagtagttatggcctgggcagtgtgagtatggcctgggcagtgtgggtatggcctgggcagagtgagtatggcctgggcagggtgagtatggcctgggcagggtgagtatggcctgggcagggtgagtatggcctgggcagaatggtcttgagaagggaagggtagacatggcctaggcagcgtgggcctgagcagtgtggggacagcctgggcagtgggtgataaaggagcatttattcatttccttgctgtcttcatgaacacatcttcagcacaggctttgtctaggcacaggcagtcctagatctttcaaacttccagacaagtgtgacagctggtaagagcagacaggcacatgtgttccggccccactaactcctctgaagtgaagactcttattcccctacttgcctgtgagcaaggacctatggactgtgcaggttaatgagatgtctgccatccatcacctgaattgacctgacattaccgcaagtgtccttggtacctttaccaagcacggggaacatctcattttatcctagggtggccttttcagcccctatcactctctttgtttctcagatgactgtgtgaggcacaggaagatgaggtcagctggcaaaggccacgtgctgagcagacagtgagatgaggacttgtcgttactgtcactggagtttccatgaacagtgtgcctcatccttagcaccactgagatttgtcagcttgagccgggcactgtaagatgtttagcaacctgcctaatgccagggtgcacccctcctcagctgtgacagagcccagaatgtccccaggcattcagcccatcattttattctatatttagctaattaactttcagacaggctggcctcaaacttgctacactgctgaaaatgaccatgaacttcctatcctcctgtcttcagcttttgtgctgagattacaaaaaggtgttgtagtggcatgcctagtttctgcttggctgaggattgagcctgtcagttcatatatgttggcttcatacatgctggacaagcactcttcaacaagctgcatccccagccttcagtccttcccctcagcccttcattttaacatacacatgaaattcttgactggtttataaaattatttttaatgatacgtatgtgggggcaggtattggtgtgtgggtgtgtaaatgtgggtgtgtgaatgggaatgggagtcacaggtgggattaaaggtgtgcaccacccgtgcctggataaggattgcagcccctacctcgctgttatcacagatgatggaggctgaaaaggattgctttgctctgatactgtttcagatttccaaacgtagggaacagtacaaaaactgacattttccaaaacagtttttggagtaacttaacagacttgatttcttatcatccttaagtacttcactgtgtgtttcataataaccaggacattgcagtaagaccatcaggatcaaagaattcagcctgttctatcaccaccaatcagtgcccagatcagactggtttgtttcttttctcttctcttcatttctcttcatttctcttcatttctcttcatttctcttcatttctcttctcttctcttctcttctcttctcttctcttctcttcctcttcctcttcctcttcctcttctctttccttcccctttctccctccctccctcccttccttcttttcttcnnnnnnnnnnnnnnnnnnnncctccctccctccctccctccctccctcccttccttccttccttcttttttggtttttttgagacaggatttttccatgtagtcctggctgtcctaaaattcactctgtagaccagaccaccctcaaacacacagacccacctgcctctgtctccttagtgctggaactagaagtgccgtcatacctggtcagaatgggtttttttgatgtgtcccaataacatttttggcttggatcccatgcttccattggtcaccagatctgtggttctcctctcatcttggtcagttcccaattattccttgggtatcaaagccttcacactagggagagtcatgagctgatctggcctgtagtcctgatcttgggtcttgacctctagtacaaactacaagaatggacttgggccatcagtctttgatgctgagatctttggggagcttcctgccacacttccatctgtcattttcctggcactgtgtatttggagcactcttgcaaacccatcagccaagccacaccttgataatgccttggtaatgactggtaaaggagggtttagagatttgtcaataacctgctctgcttttaatcaaggtttgttttcttgttagtgtatgtatatctgtgtgcattcataggtttctttcattattttaatgttgccatcattgtagcaaattcttaaccactgtcccagagctgggtagcaggaatccctccagacatgtccttttgtgttgcgggtaccattttggttttgtttttcattttttgagacagggtctcatgtagcccagatgtcctcaaatatgtcctgtagctgagactagccttgaacttcttgttgtatatgtgtgtcagggggaggattgttgttgttttgttttgtagggtttttatgtttgtttgtttgttgtttgttttttgagagatgttctcactatgtaaccctggccagcacgaatacacagagatccacctgcctttgcttctcgtgcacttggtactccaacatgctattttgaggtgctggggattgtccttttttttcgggagcccttccaggtcatctctccacctagggagtctatttactgagtctactggtcccaattgcaaacttctacgtcagagctgtcctgcctcccacagctctgccatgggactgagagttcagagtaggaacagagctttaaatctctggcactcatgaatctccaagcgtggcctttggagcggatcagtgatcagccagctgagcccggggccactgctgtacagtctgtcctggacttgggccctggggttcggaatagatgtacaagtagattgtgattattccaaaaagcaaggaaaccaacaaatgaggacaagcaggctaacgcaatcgttattttttaagggaagagccttgggcaatctgaactctgcccttggcaagttctactttgggtctttctcagagaattcacaggctgtaacagggcaggctgttggcagaggatgaggccctctagattctgccctctattttttttaatgtaactctttttttttttttttttttttttggcttttcgagacagggtttgtctgtgtagccctcgatgtcctggaacttgatttttagaccaaactgaccttgaactcaaagattagcctgcctatgcctccctctgtagtgctgggatcaaaggtgtcaaaggtcgccactgcccagctttagattctgcttttttttttcaccttgatgtaaatacatgcttgtttctgaaagttagaatctatacatttttttctcctgtcatagaaaatctaaactgtgttagcaaacctggggcctcttacagggggtcctcagccccttggtaatcatttagcttggaaaaatcctaatgaggcttcactttttagaagaattttaggataagaggaatccgttccttccatctctgacactgtgcggtcagtcccatcacaaagctgcaagaggcaggagagcccccaacacagaaatctgcttttggagacctaacagacttaatcaatgggttccctaggtggagagacggcctggaaaggctccagaaaagaggacaatcatcagaacctcaaaatgtgtagtgggacacacccggagttccagctcttgggagacagaggcagctggtttgtgcctttaatccccgcagaggcaagtggatctctgtgtgttcacagcagccagggctacatagtgagaacctgtttcaaactcagatgtgatggtgccatttgtaatatcagcacttgggagtaagggagagagagatcgggagttcaagatcatccttggacaagttcgaggccagcgttttacgcctctcctcaaactgagaaaataatggagtcccaatgtggccatgcccaaatgattttattattgacttcttctaatggggttacatattagcacatttaaagaaataaacagtaattatcattttaatttttaactatttaaagtgtatatgagcatttgcttgcatgtatgtaacaccacaagcatggtgcccactgaggccagaagagggcactggatccattgaaattggagttacagaggttgtgagcggatgctgggaaccgaatctagatcctcctgaagagcagccagtgctcttaatgtctcagccacctctccagcctcaaaatattgtgattaaacaacaaaagacacacttattatttctttacttggtttctttttaaggtgccagggacccttcttatattcagtcagacatctccttatgctcccctgtgaaagcttcttagacttttgacctaagtggcctttgacagcactggtcagacattttgcaggattttgcctgttgggatttatctaaaattcttttgcacaatgagaacagggttctggatttggggacagaaaaccttagcgcacagagccctgtcatcacaccctgttctccaggtggctaatcacaggaaccctactgtgtgtgtgttgggtgttggggggagagaacacatggatgagttcatggtgtgaatagagtcctggccttcacatatgagagacaattgctctaccactaatgcctccctgactctcacctcctgccccatctgctattttgagatcctctatcttcataaaccctctccagagttagccaggtttgtcccatttcccatataaaaaggctgaatcttagaggaagtagggctagtttccctccagtgaagtattgtgatggatggctcagcaacagtattgtttggcatttggcatctttccaattttaaagtaattataaacactcctgcgtttgtcttcatttgtgtgacttcccaagggtgtggtccatatcgggcagggaggggccatgattcaaaggtcacaagggttttagccaaaagaccctgtaaagagatggtacctacttacagtgtttcagcttctagcctacctgcttttttctcaagacagagtttattctcttgcttctttagcacacatttttttttcttccccaggctcccacaatgtcttggcaccacatgttagttggctgattgcaaaactcaaggttgtttccaaaggataaagatttagttttactgataaaacttttaaaatgaccacttaaaccctgtctcacaagacaaaaatccaacaaataaaatgagcaaatcctgggctgaagagatgtctcagtgcttaggagtgttagctgctcttttaaaggactctggcggatccaattcctagcaccctaatggttgctcacagttgtctataactctagttccagggtatctaaaaccctcttttcatttccatgggtaccagacatacatatggtgcacaaacacacaggcaggcaaagcactcgcacatgtaatataataaaacatgcatacatacacacacttgtgtgtgtgtgtgtgtatgcacccatcaaacaaaacactctgtggtctcaagtcagagagtacctaaagtgtcagtgacttggtctgggtggttagtaatcacctaaagagaacaagccatgacttcctgaagtaacacttctgctggggacggtggttgccaggttctgtaagcaagtggtacatttgccaatctgagactgaacaccactctagcccatttacctgccagacctctaagacttcatcccaaggtgcagagtgctcaaataacattttggtttgttcattgttggttaatctgctgtgcatatatcaattaggattcagggtcaaactgctaagccagaaagcatgttctagaagcagctcaccaggcatgctggccttaacagcatgaaccttgatggcatcgcagggaccctaactgaccccttgggagtcagtaatggatctgtccccctacaggattgtccctgatggacctgggatagattgggttgggttgaacttgatactgtgtggctacttcctcctttctcagggagctggtgagctaagtttaaacgttataatgtatgtgggtatctggtctctatttaagacagaaggataccggggtgaatggcagggcctgaggtgggcagagaagggttgtgttctgagaatgatgacccaggcatctccagagccctcagattggtggtacaaagagaaatgaggcagacagaacaggagtgtcctgcagaagggttgcagtctaggctgtggaaaggaggccccagcacactcctgcctcagaggctggcttcaggcatgccaaggactaatccttaaattgtctactgccagcctagggcttgagccttggagagggccaggctcagccccactgagatcccagggtgttcccagggtgctatctgttaacagatgggaagtggtagagggatgtcagactgtctttggtgacatttctactctttttttttttacagattcctgtcctactgaaaagctaaccgtaagtgccatctccacccacctcagcctctgtccttttttaagatttatttatttactatatataagtacactgttcccgtcttgaggcacgccagaagagtgcaccaggtctcattacagatggttatgagccaccatgtggttgctgggagttgaactcaggacctctggaagaacagtcagtgctcttaactgctgagccatctctccgtcctctgtccttttgtttgactactttccttacatgtctgttgattcggggctgctagggccatagaaggaccacagagctatcctcttccctggcacccaaggttactggtcaagaagctaggtacccagggtgttggcctggggcccccttggtagggttcaactagagagagagggctccaccccacagcaacctccagctcctggctcagccccaggggatttccagcagggattacagacaacagcttggtttgggccattttaagatacccagtctagtctggagggaggctctcttctttcctctgggactcttgtctgccaagtgagaccatagacaccagcagcacacacttacaaagttagctatactttgagcattgagcatttaccatcggctaggcacttgcactccctcttcagctgtctcttctttgactgtgcagccatcgctgaccttgaaatccaagtgtgagcactgcttccggcttgctagaccccctttctttgtgctagacattgccccagagtccttctgactctcaggaatggttactcttgccacatttttggtaaaagaggaagtggcaatccgacaagtcaggagcagttggtggctccattagaatctgcattgtgggagttcagagctggtgctgggccctgtgcccctagctgcctccttggagatcaggggtaggagcacatgcatcgtctcttacagaaggcttcatgtgtgccaggttcagggctttggggaggctacacacaattgctgagtcctctttagccttgtgctggagacctgccctgtgtctgttttcctggggaacatgtgatgatggggctcccctcaccccagctgagggaggggcggagggagggagggagtgcaggcttcaagatgaggcacctgtctgtgccacacactttttgctttttttccccattgatcaagtcgcttatcacttttctctctctctctggcatgcttgcttgctttcacaacagcttttttctttttccttttttttttttaatcaatttacacgttttgttttgttttgcttttcatgcgtttgggtgacttcttgcatgtatgtctgtgtaccatgtacatgcctagtgcctgtaggaataagaaaagggcatcaaatcccctggaactggagttacaaatggttgtgagccactgtgtgggtgctgggaaccaaattctggttctctggagaagcagccagtgcggtcaaccacagagtcgtttttccaaccccaaattaatttgttttttgagacaagatctgatgtagcccaggctggttataaattcattatgtagctaaggatgaccttgaacttctgaccctccttccttcaccaagtgttaggattagagtcctgcaccatgtctggctaaaattagtggaagggagggtgaagggggattcctgttctgggaatcagatcagagtgctaggaaaactctacaatcctgagctatatccccagccctggccttcaaattattgtaaaagaataatcaagattccatatatctgttctctgaatctctcaccctgggtcctttcgaagactgcagatgaatgccacacgccaggtatttcatttccctttgtacttactcgtaaacgtgagaaactgggactggagagatggctcagtggttaggaacactgactgttcttctgaaggtcctgagttcaaatcccagcaaccacatagtggctcacagccatctgtaatgagatctgacgccctcctctggtgcatctgaagacagatacagtgtacttacatataataataaataagtcttaaaaaaaaaaaagaaaaaagaacacaggaaaaaaaaaccacaaaacacattttttaaaaaaaataaataaataaataaataaatgtgagaaaccaaactaacacatttctaaagacgtggctcttttttttttttaatgtattaagatgtggtcaaagacttctctcccagaagttgagaatgaagaggtaccaggagttggtgaggctagaggagactccagcatgtagatctttggttagaaacgtactaactatatgtatatacaaccctggctgagttactcgactctaccaggcctcagattttccatccgtaagatgtgcaggtgctaatattacaaccacgcagtgtggttttgagaatggcacatcactcttaggactagcctggatgtagcgagagtgtgtgaaggactgactgctgctcagcacagagtgaaggcaacatgagttgagggtgtggctcagtgggtaggtagagtgcttgcctattaggcaggaaaccctgtgctggggtcccagccattcacacactgggtgtagtagcaccataatctcagtcttgtggagatgaaagcaggagggtcagaggttcaaggccatcctcaggtattatcaagtttgaggctagcctgggctacatagactgtcacaaaggcaaagcaaatagttgggtgcacacctttagtatcagcacccgagaagtagaaataggtggatctctgtgagttcctgggccagccagctttatatattaagttctagatcagccacggctatatggtgagatattatgtccactaaaaaacaagcaaacaaaagcacgttaaaaaaaaaaaaaaaaaaaccctatattcttgggtatgctacacaggtgccttatgctgtcaagtagcttgtggcaactttaaagaattttaaaagcttttcacagccttcccaagcctgctcagcccttactcctgttcacagcagccacagagaagcgggtcggtgacagatcccagcacgggacacaagttgagcccagtgagccctcctccagctgtagagacttgtgccagtgttggggccacctacctggagaacctgccgctgctggatgacagcccagctgggaatcctttttctcccagggaacctccagagccccgggtatccacggaacacaccaataacaggattggtgagtcctgttgggagatcctggtctaatcatgtgggcagatgggagatgggtgctgagctctggatgggacttggggagctatgcattccttgccacccttcactctgccctacatcaagcttctgtccaggaagaaggccagagtgacacttcgtggggagaactggggacattcactaagagggcacggagtgatgaacacagtgtgtgtcatccttaaagagaaagagagtctttccccactggcctaatacagagccagaaggttcggaatgatgtcagacccttatctagcaacaccacttcatgtctgtcacaacctctgggaacaatgacatcaccctctttcatggctggagaaactgaggcatggagtggggtttcttcttcagttgccaagactcagccccacatctgctgggttctggaacattgattttttttgttcgtcgtactcatgggtctcagcggaagcctagagaccagccctggccctcctgcatttctcctctctgctgccctccagccaggaaaacatctgccatggctcctatgggccctgcttccatcctcacttcccaccacttccgaacatgtatcagtggttcctaacctgtgggttaacagtagcaacattacagttaaggagtagcaatgggaataatggtatggctataggtcacagcatgggggactgtattaaagggtcacagcattaggaaggctgaggaccgctgatgtatattgtccccttcactctcaagttggaatgttaggttcttattctggcattcaaggatggtctcagccagctgttccatcccttctgaggcatctgttctccctctgaggggcagctttctgaattttcatctccctctccctggcttctcccctccccctccccctctcccctcccctttctccctaagctgctctgcagggttatttcctctactatagcaggccttttgagcctggttaccccttcatgtcctagaggtagcattctcacactgtctactctgaacaagccaatgctctcagctgagcttctccacccagtgtcccagcccccagctaggtgctccctagagtgctgctggctctgttctgatgctagaaggacattggtgacagttcttcacattcccctggaagtctgtggtgatgagagctctagagctgtcttggtctcaaagaaatgtttgcagttaactgctctcggttaagctctatttgaaaagaatgtgtttggaaaaacactgccaaaggctccttcagttttccaaggagtcctgatggtgtttgaatccaagatgactaaagggcttggaacttggaaacagggccagagcctgttcagggagggaggtggcaagggttagggatgaggaagggctgctgagggaaggccttaagaggtcctctgggacaccagaactcaggtgactcatttgtcctctgagtgacacaccagaagagcagtctccccatccagtttcctacaaggacaaatgggtctaagtttcctccttctctggctgtacccactttgcctcttctttccttaacttgactggggcattttccccagagctggggtgggggtggaatctaagcagctggaggtaggcagcctgtgatgataaagccagaggatcgggctccataggcatgacagagcagtagcctgtctctgctctggccttggtttcttctgccctcacacctcccgcctcacatacacattactctccaatacctctctgtctctctgtctctgtttctctctctctttatttattggggggcggggtgtcacgtgtgcatgtagaagtcagaggaccacttatacatgtcagttctctccttccaccatgtgggtccgagggatcaaactccggtctttgggtttggcaacaaataccttgacttactgagccatcttgaaatgctttcatctcatacatttagtttgtgtgtatgccactgcatgagtgtggaaatcagaggacaacttgtgggagtcagttctctccttcaactctgtgagtccctctcatagctaaaatgaagtattttaactagcccatataaaagacacacaatccaggtatcttatttacaagccataatcctagactgggcagatttggggctattctaacttatgtcccagccatatgtcccttgttacttgatgtttttcccggccatgtgctcatggttcatgttttctcatgatggccttctctagtctctgtgtcctttcttcttccctctctctacctgcaaaccccaaccaggtagctgaaaacccgcctacttctaccttttgcccaatcacgggccttagctttttattgaccaattaacttgaggagcaaggttacatagcaaatgtggtacacatgaggatctcctcatgccttgtgatctccttgtgcggggtggaggtagccagatggtgggagccaggatttagcatttgaatacaagcagcatccgcctaacctcctacagtaacctcttcttagttgaccccagtaactgacctctggtcccatctgttctttttggtaccagggattgaacctggtgccttttacatactaggggaatgctctactactgagctagtccactcacctttgtttggtttaaattttaatttttaaaattaaaagctgtgtgtgggtgtgtttgagtgtgtgtgtgtgtgtgtgtgtgtgtgtgtgtgtgtgtgtgtgtgcgcgagtatatgtgtgtgcatgtgtatgtgtgcatgtgnnnnnnnnnnnnnnnnnnnnnnnnnnnnnnnnnnnnnnnnnnnnnnnnnnnnnnnnnnnnnnnnnnnnnnnnnnnnnnnnnnnnnnnnnnnnnnnnnnnnnnnnnnnnnnnnnnnnnnnnnnnnnnnnnnnnnactcatttggctgttggagatctgaactctggtctttgtgcttgtataaccagcacttttccttctaggttatctccccagccttgttgttctctggattgtttttgttttgttttatttgtttgtttgacagggtctcctttagcccaggctagctttgaactggctttgcagccaaggatggccttgaacttctgaccctcagggcttgtagcctttgatattacaagcctgtgatcctgcatgtggcccctgctcccttttttctttttctttcaatcagattctttgtctgtttgtttgtttgttcattgtttttgttttttgtttttgtttttcgagacagggtttttctgtgtagccctggctgtcctggaactcactctgtagaccaggctggacttgaactcagaaatctgcctgcctctgcctcccgagtgttgggattaaaggcttttcaatcagattcttactgagttaccgaagctggcttgaactcactcattctgtagcccaagctagctttgaacttgccatcttcttgccttggcttctccacatttacaggtctgtgctccccagctttcatctttcgctagcccctcagatgaaagtcccagcaaaccttgatggaggatgtggcatggcacctgagaccctgctctcagctctggagcccatgggacacacagttcgtccctttctcttgcccttccctctcatgtttcttacacttctctctttcctgggtgtgtgagaaaccgaaatagaagagctgccatggtgcaatgctctcggacatgccggggcacttgagaatcttctgggcttcctgaatctgagggtgtaacccaaaggcagggggtccatgtgccccctgcgtctacccacccccactcctaagttcccttttgagcttccccattccatctgcagaatccattgcaggatcagcagagtggtacaacccccagcctgaggcccagtgagtagagctggttattctggtgaatctaggcttctgcctcccagttgcaaagatggctttgtttccctaaggctccctgactccctgcatggaaaggccatcccagcaacccccagcatcagcttgtgttgagactgtagcatgtactagtgctaggagcctgggctacccattcacttgacactcatgatcccctctgccttctggcagcatgaggtccaggggctgggcacatagacacatggggcccctggctgctgttgcatatcatcaggacccaggtttctggagaacgtggccaatcagccaagtttgcctggactgatgaagctcttgggacctggaactcatctgtcccaggcaagcaggggcacactggtcacccggggtgttttgttttaggcatgtggatgcaagggcagccaggtggctggatgcttccttggagatgtctcctaaccttacctgctgacctcaggttctttaagatttatttattctatatatatgagtacactgtcaatcccattacagatggttgtgagccaccaggtggttgctgggaattgaactcaggacctatggaagaacagtcagtgctctttattgctgagccatctctccagctccctgacctcaggttcttaaccatgcagaggattagattagtggatggtgaggggctattagtgggagtgctgggtctcagagatggcacttgagaagagtgagggacatgtgtggctctgatttgtcccctggtgttcttactaccatcctgcttttctttacctgctatttcctggactgactgcattctgtccatctctgatgacatgcctaagaaaccatgggtagccccatcaatacctctctgtgtaacagagaggctgtggtatctgtgcgaagtcacccagcacatgaggtggtcctggtctctcctctctcacccacctttttgccttacagagaaaatctacatcatgaaggccgacacagtgatcgtgggctctgtaaaaactgaagtccctgagggccgggctccagcagggtctacagagtctgagttggaagctgaactagaagtggaccatgccccccattacccggagcaggagacagaaccacctctgggcagctgcactgaggtcatgttctcggtggaggaaggaggaaaagaggaccatgggcccacgactgtctctgagaagtgacaaccattgttagctggggctagagagcagctgagtgtacccttgagatcaagttagcacctgggaagctaccacaacttgaactgaagacccagcatccaaggtagcccagaatgaagccttcagctgctgccaagagcactggcccctgggccccatcagtgggcactcaccatcaggctgatgtctactgggggagaagccacaggcttgatccaagcttccttgcccacactcctatgccctgccttctctccttgggtctcgagtgatggctttactgccatgctattagcctccagctgtagacatggctccctgttacagaaccagcacctattgcttctactcttgagacagagggaagttaaagaatgaatgctcgtcatcactggcacaaggatggcctgtacccatcacacagggagggcagaatgagacccttttggcacagcctccctgttctatggacctcctcagcagctgcagtgaccccacctgacaagcactgctcaagactatgctttgcccaaggacttcctgtcacacggagatgggagaactgtagtcctggaggttcttaacactttgtgccattatctgttccaccctggaaacgaagaagcattgtcccaaagcctccaggatcaggtccaatgacacctagctcccaaaggaaactctagcaagtgggagcctatctttgaaggtaccctgctgctcacactgcttagcccacgcccactgtgaggaggccgttctggtgaacatacctgaagatctgcttttaatgttttgttttgtcttgttttccttttgaggtactgagcttgaacccctggctttgtgcatgccaggcaaatgttgcagggctgatcccacccaccccagaccagcatttcatactaagcactaaagctgctgtcactcacagcctggctcacccactggcagctgcatactcttgtatcaagcagccaactggatgacacatctgctctgtggcagcttggagactctggacttacccttgggccaggcagggagaattctgtttactcactagctgtttgctgtctggaggaagttgggaccctgtcaagaatcacgaggggagtttctgaaaccgcctgaatatttggggaaaaactggagcagctgagtgccatcagaggcgttataccacagtctggatccaggccagaagggatgtgtgggggatgaagagttgcccatttgtcttgtgcaaggacacggtggatatgtgggcatacacagtggccccaaagccatgtcatgatgaccacatggataccacacttttggaagatattgcccaactttttctttttctaagatgagatcttgttctgtatcctaggttagattcaaacatgatatgtagctcatgctgaccctgaacctgtaaccttcccatcttaacttcctgagggatgacaggcttgagccactatgccagactgccacacatttcagcaaagtgacatattcccttacagagtggctcttcacacaatttttgaccctctaagaatccttaagggcctgttaaaacaatggatttgtaaggctgaaggcttatcacagagttgagtagtgagaggtcctgaacacgaagggtgccaggggtctggtctgccgccccacccccacccccacgccatttcccccaggcagggcttttctctgtgtgcacgatactcacagccaagggcaggagcctttgaccagctgtgtgccctttaaatttctccctgtccacccgggcagtctctttttccctgtttatgtcctgtcctccaaggatgctgggaataaagggtctctgctcacacggctgcctttggtatttgtagaatgaatcgctggcctctccaaggctttcttcccacaagcaggtttggaccatgcaacttcggaaaagagggaactccatgtagctggtggagccgtgggtctctggaacccaggtcttgtatggctgagcaagttccaccaccctacacacagaacagggcagagctccagctatatgcagccagaccagagtttccccctctctggcatctgtcctctccattcctaagactgtagcccagacctgcacctcacctttagcctgacacagaacctgctgcttgtttgccatgtagtcgggccaggaaccagagctcccctgatggggaacttcctagctctagctgttctgatgttcagaacagtgaagaatcaggcccctgttctcaagggggcaatccctgtgcggtgagcgaccctgcccccatcacttcctgagcagttatctgcagttggtgtctagttctttgatgctgttgctttccaaggcagttgggtagaatctccaggacctgacaccagtctctccgatgggacaaaagggctgtcccccaagttgccccttctccctcttgacttccttcccaacagtgagtctgcaaggactatgtcctggccatctttacttgggcagtgttgcactgagctgagtatacatgaaagtgtactgggataatggaagtccccagctacagttttctacatgtctcctcttgcatctgggggattggtgctcagagtcaggttcaaaccccagttctctcagagaccaatagggagcttgtttgagaaagtggaggccaccaccatctgttgctatagcacaatgtttgagactgggaaatgtattaagaaaggttattcgggctcatggttctgacagataggaaatccacaaatgagcagcctcgtctaaggaggcacattgactcactgtactgggaaaaacagggcaagtaggttaaacatgaggccgaactgttctcacagtagctttcagtcttcagacagtgtggattgactcctcaggggcccatggagttttatggactatgagcacccttagtgaccaaaccttcctgtggtcttcaccttccactagtgctccaatgtcagtcagatctcagcatgaccttcaatgagcttcactatactcaccttaaggctctattttctcatctgtgaaatgagtattagtcttgacctgagaaggctgtgggcttcccagagatgccactcatgattagtgactttagtttttattccatccaagtggtcacttggtccagagtaaccctttcctctagcatataagagggtccccacagaggccacaagatagtacacataggtttcaggaaaaaaatatacttaatgatgattggttctaaagctagtcctccaaaatctacttttagtctagcctgatactttgcctctcttgtagcctcaacaacagtgcaggttacttcttgctgaatgaggaaccctgggaactcttcagttcagtcagaggtctatctgtgtgtctaaaaccctagctatttatttgaggtccctcctggttctagtgccttccggaacacactacattctgttcaagatcttcttcttcatagcagccctttttcaaaaacacatacactgaggcaagcccagctagcaaagaatttctggcacacagctttcctcccagggatcctttgtccagcaggtgtgacattggcttaagcttaagatccagtctgtgatgtggtggtgaacatgttagtaaagtagagacagggggatctctgtgagttttagtccagctcctgggtagtcagggctacatatagagtccctgtttcaagcccagtttgtgaattacccctatttgggttccaggacagaggcaagacagtgtctgcaatgacaaggttggggacagcttcccaccaacactgtagttccacctgagtgaaataagccagctaagcttgaatagccgtgaaatgaaagcaagaatagccagtgcaaaggctctgaggtgaaaaagctcctggacttgagattcaggaagaatatagccatacaggaagcccagtgtgtggagagaaaggaggtgggtggggagaacttgcccagcgatgcctgctgagccattacagagcacttagggtgtatcaaaagaacactgttccatgctcagttttatggtcctgtaagtacaataaacgtttcagatggagtgacaaaagccaaaccacaggggcatcaaaagtcccaagagcagatttcaggggaaacttaagaaggctggaacaggaagcagctgagcaggcagcccacaacattcccaggtactgctggggagctacaggagaagggttcagggaggacaaggtttctctttcttctgggatcttccaagtctggatggagaagcctggagaaggcttggagaaccctgggcattggttatcctgtcatctgagcaccacaggatttatcagtagccctgacaaagcatggggacactttgtcatgggaaatagtggaggttatggctacgggcgagacgggcctccagggttcagtttcagctcagccagttcccagccacacagtttcacactcttgccacttgtttccggactgacagcatggactgaactctcacctggcacgaggctgggatgttgtggggataaagtgtctagcccagctagcagttttcatggtcactattagctgccttttcagaccgtttgacttcaccaagcccttctttagtctgtgtctgcacctaggatcagtcctaggtcctaggtgcctgcttctctgggctctgagtggaggctcactgtcccacacttgcatgtttaaagagttggagtgcatcctctcaactccaactccagttcccttcctggatgcaggtggcctggctatctctgtggtgagaagtaagattgatgctgtgagcgttataagccgctttcaggcaagtttcagctgggagttgccacctctgtgtgatgtgaccaggctctatcacacatcccctgccttgatggactggaccttgagggaccaggagccaaatttcacctttccttccttaagttgtttcagttagattgtgatcacagtgatgtgggaattaaggaggagggtgtgaggtatgtgtgttgcacatgtagatgtaaggtacacacttctctgtctctttgttatcttacccccttgagacagtgactttcactgaatctggaactaggctggcaactagcaagccccagtgatcctcctgtctccacccttcatagatctgggttgtaggtgtatgtagccacatcctgctttttgcatgggtgctggagatttgaacccagcccagtctttatgcttgtttattaagtattctgtcttacttaaggtttctattgctgctatgacacaccatgaccaaaaagcaagttgggaggaaagggtttatttgccatacacctccatattataatccaccaccgaaggaagctaaggccggagctcaaacagggcaggaacttggaggcaagagctgatgcagagtccatggatgagtgctgcttactggcctgctccttgtgacttgctcaacctgtttccttctagaacccaggtccaccagcccagagatggcaccacctacaaagggctgggccctcccccattaactactaattaagaaaatgccctacttgcttgattacagcctgaccttctggaggcattttctaattgcggttccctactctctgatgactttagcttgtgtcaagttgacctgagactaagtgtctaccacatattcttacttacttagccatcacctcacgttttgtgcatactcaacagggattttaccaaaagagctgcacttccagacccttatgtgatattctgtccccttggattatagggatgccttggatcttatagatccagagagctgggtcagagactaagggtgcttgcttccaagcctggtaacttgaattcaatacctaggacccagtagtagaagagaaccaattcctcttatacacacacacattcacacacacaattcaaaataaataaatgtaaacacatatatttataattcttaccagctacttgtctttctttttttagataaggtagtgtagtattacccaatttagtcttgaattcctagactcaagtgccagtgtagggatcacaagtcctgtggtcttcaaatatgacatgcatcgtgtttgctctatcactagcaagtagattcagagcctagaccccaggtaccagaagtcttacacgcgttctcgcgaccagccaggaagaacgcaacaaaccggaatcttctgcggcaaagctttattgcttacatcttcaggagccagagtgcaagagagcaagagctctattgcttacatctttaggagccagagcgcaagagcgctagagtgcaagagccagagcaagagagagaatggtgaaaccccgtccctttttaaggagaattatcctccacctaggacgtgtcactccttgattggctgcagcccatcggccgagttgtcgtcacggggaaggcagagcacatggggtggaaaactacccttggcacatgcgcagattatttgtttaccacttagaacacaggatgtcagccccatcttgtaacggcgaatgtgagggcggctccccacacggaagacttttgagaacaccctgtgtatcaagcctattcatttcccttgactactttgaggcttttgtatctatgtatgatgtgtgtgtgtgtgtgtgtgtgtgtgtgtgtgtgtgtgtgtgtgtgtgtgtgtatccacatgtgagctcttgaatttctgaggttgaagaatcatactctgttgtttttctcctttattctttgaggcaaggtctctcagtcaagctcagatctcactgatgtggctaatcttgctagctggcttgctctagggaatccctgcctctgtattccaaggctgaaattacaggtgggtttttactttctccacgctttgcccagcatttattctggtttctggagatctgtactgcagtcccctcactgtatggcaagtactctaaccacctagccaggtctccagctctggattcaagtctttctgtctcaagcatgtgctctgtagtcctcaggaatgtcttgagcacacaagggccaatgcacacacaaatgggcagggatgagtttcatactcccttgtctgactcaagaacattggtggctccatttagtttcttttcagaggggaaaactgaggctctcagagctcatgcctggccacctgagcaggggacaggatctggcatcttctagagttggatggaccctctctcctgaaacccaatggctggtcaaactgcaaggagcctggtcaggaagtcagagttgcagacagattactcaagagcgggatgtcacaggtcgtggttttttttatttgctagctttggaaatgccaggagcttcaacacacatcagggaaggccccaccctggacagagaccctcagcaaattctggacattcacaagatgaaccagtgccctgtggaccaaggtcagtcatcagatttccctgaatgtcacttgacctttctgggtcgcacaaaggggcctcatccctgcctccatcaactcatacatgttatgaggagagataggaccaactccctctaaggcttcttgtattctctcccatgaacctcctgacaggatgctcagaagtggtggctacagatacccctatgctgctgtcgaggaaactgatgctcacagctactaaatggtgcagacaggattcaaacccaggtcacctggccaggactccagttcccagccacttggctgtgatcaactgtggctcaggcagaggtcgcttctgggtttttttcttttctgttgctgctttattttatttgacacttttactactgttgtggaattggctacagggatctaagtcacacgctacactgcctgctttgcctggtcacaataggaatgctaagccctggagaacacgttctggatccagcggctcagaaattcccagacaatcgttgcctcctggcttgcacttcctttccaaagccaagtgctggccaagtgcatggaaccttcagtagctccctagggccactgtctactagtctggccctccacaaacatacctgttagtttccatagctctctgtcttaactgtgtctaaggcccagttgtgacccttgagtggccagcatggaggacactccccagcatgaagtatttgctcagtgctgacatcctgagcttcacttgctcacccattccttcctcttccagagattttccagattacacagttcccaaagcactgactgcttgaggaatggaggccaagtctcagaaacccagaaaaaaaagaaaaagaaaaagaaaaaaggaaagaaaaaaaaagatctgtgtctaagaagaaggttttattcttagtcactgttctattgctgtggagagacatcatgaccaagacaactcctacaaaaggaagcatttaaccaggggcttgcttacaacttcagaggtttagtccattatcatcatagcaggaagtgtggcagcaggcatggtgctgaagaagtagctgagagctttgcatcttgattcacaggcaacaaaaaagacagagacactggggatggagttaaagtccactcccagtgacacacctcctctaataagaccttctaatctttccaaacaattcatcaactagggatgaagcatgcaagtatatgagtctatgaggaggcacattctcattcaaaccactactcatttgctcattcagttgctcaatctagaggcctgtgtggaacagctatcatgtatcaggcagggagcactatgaggcagggtactgggtgttgaggaacattgaaaggatgggggatgggtggtgcctgggtatgcaggacaactctttgagtgtcaaagaccacctgggaaaggaagcctgcagggaaggccttgaccttagggggcttggagctttatagtcaagtagatggcacccagggaaggcttgggttccactctctcctctgcagagtacttctaaaaagcatgcccacaccaggaaagttgcattaaggtggaacatatcttattttgttaaataaatatttatcaggccgggcgtggtggcgcacgcctgcaatcccagcactcgggaggcagaggcaggtggatttctgagttcgaggccagcctggactacagagtgagttccaggacagccagggctacacagagaaaccctgtctcgaaaaaccaaataaataaataaataaataaataaataaataaataaataaatatcaagcccaaactgcagggtcatgatgcttagagccctcacggacagccaaaaatctgagctaaccttacctggtggaactgataaagtttatggtgcgaggggtcgggggaaacctcagggtaagtcgggggtcacagtaggacttgaggatgtggcccaagtttatggggacatgttttagttacttttctcattgctgtgacacactacttggccaaagcaccttaaggaaggaggtatttactttgtctcacagtgaggaaggcatggagatgggtgcgtgaggtcgctgctcacatcgaatctgcagtcaagacacaaatgaattctgctgctcttcttaccttcccattcttgttcaatccaggaccccagcctttggaatggatctccctacacatatagggtgggtgctctctacctcattaacccaatctagaaactccctcacaggctcgctcagaagtgtgcctcctagatgattctaggtcctgtcatacatgctccaggaagagaggcaggggtgctgggcgggcagtcatccggaagttgtactgaccttaggagggcctggagacactggcaccagggggttttccttctagcctgtagcaggaaagcacagctggcatttcaggaaacccttccctacaccaacatgttctaagtctgcatttatttacttattttttatagcaggaattataggcatgtacgtat

SEQ ID NO: 1247 - DNA, 1500 bp, Mus musculus
tttcaccgcgggagagtcagggtgccggcaggtggccaggcgctggagactcgggaagccaagatgagcgccctactcaccgcagcagggttgctgttcctggggatgcttcaagccttcccaacggatcgaccactcaagaccacctgtgccggagacctcagccactacccaggggaggctgccaggaactgctgttaccagtgcccctcagggttgtctccgacacagccatgcccacggggtcctgcccactgcaggaagcagtgtgcacctgactactacgtcaatgaagacgggaagtgcacagcctgcgtgacctgtttgccaggccttgtggagaaggctccgtgttccgggaactctcctcgaatctgtgagtgtcagcctggcatgcactgctgcacaccagcagtcaattcctgcgcccgctgcaaactccactgttctggagaggaggttgtcaagtctccaggcacagcaaagaaggacactatctgtgagctgccttcctcgggatctggtcccaattgctccaatccgggtgaccgcaagacacttactagccatgccactcctcgggccatgcctactctagaatccccagccaatgacagtgcaaagagcttgctgccaatgcgggtcaccaaccttgtgaggtaatgcagagaagaatatgaccttggagcttccatctccagggacactccctgacatcagcacctcagaaaacagcaaggagcctgcaagtaccgcctccaccctaagccttgtggtagatgcctggaccagcagcaggatgcagcccacctctccattgtccacgggaacaccatttctggatccagggcccgtgctcttctgggtggccatggtggtgctactggttggctccggctcctttctcctgtgttactggaaggcctgtaggaggcggttccagcagaagtttcacctggactacctagtgcagaccttccagcccaagatggagcagacagattcctgtcctactgaaaagctaacccagccacagagaagcgggtcggtgacagatcccagcacgggacacaagttgagcccagtgagccctcctccagctgtagagacttgtgccagtgttggggccacctacctggagaacctgccgctgctggatgacagcccagctgggaatcctttttctcccagggaacctccagagccccgggtatccacggaacacaccaataacaggattgagaaaatctacatcatgaaggccgacacagtgatcgtgggctctgtaaaaactgaagtccctgagggccgggctccagcagggtctacagagtctgagttggaagctgaactagaagtggaccatgccccccattacccggagcaggagacagaaccacctctgggcagctgcactgaggtcatgttctcggtggaggaaggaggaaaagaggaccatgggcccacgactgtctctgagaagtgacaaccattgttagc

SEQ ID NO: 1248 - protein, 275 aa, Mus musculus
GNAEKNMTLELPSPGTLPDISTSENSKEPASTASTLSLVVDAWTSSRMQPTSPLSTGTPFLDPGPVLFWVAMVVLLVGSGSFLLCYWKACRRRFQQKFHLDYLVQTFQPKMEQTDSCPTEKLTQPQRSGSVTDPSTGHKLSPVSPPPAVETCASVGATYLENLPLLDDSPAGNPFSPREPPEPRVSTEHTNNRIEKIYIMKADTVIVGSVKTEVPEGRAPAGSTESELEAELEVDHAPHYPEQETEPPLGSCTEVMFSVEEGGKEDHGPTTVSEK

SEQ ID NO: 1249 - DNA, 100762 bp, Homo sapiens
  misc_feature (1)...(100762): n = A,T,C or G
ctcagaaagaaccctggcgcctgtgcagtgtcagtgcaagccaaggcagtggctgctgtttccactgccaagcatgagagtgggacgccagccagtggccgggctcaggccccaaggaaacacaaggtgggctgctgctttggggacgttgtttggagtcacttgaaatgcaagagtgacccccagaacacacaggccccccaggaggtggatgtggggtagacagcacaggccatttcttgctaagcatttatttccacactatctccttggacagataacaggattgttttcaggtaataggtagataagctggccgggcattggggatgatggatgctgagtctgggaggcaagtgtgtgctcacacagatgtgtacgtgtgtgtgcatgtgtgtgtgcctatgtgtacgtgtgtgtgcatgtgtgtgtgcatatgtgtatgtgtgtgtgtgcagcactgaaacaggccgctgaccgctcccaaagccctgatgttccatcagcctctgcagtcacagccaagcagacccttgagacccctgccatctgcctcccttgccagagtctgaaagcttggggtcaaggctttgctcccctggtgacaggcctggaaaaggaaaatgatagcaagcagcaaatacacacaataaagccgggcgagggcagaggggccgggtgggggctcaggaggctggggcctgggggctgtccctgcactgactggctgtgggactttggcctcagggtcggtgtaactggggtaggggagcggttgctggatgtggcgacccccacctcagctctcacactctggccagtgtctgatgcaaaccagaacccagtgaaatcaccatgagtcgatgggggttatggatggtaactgatgggtttttctcaggccagatcacagttccagtcttcagggggaggtccccatgagtctccagatctagctgaggcttgagttgtggccacgccttagtttctccacattgccagggttttgtgtctggtgagccccaggccagactgggccttcaggcctcctgcctcctgtttggagggagggatgattctgggagnnnnnnnnnnnnnnnnnnnncccactcccagccacatggagggaatgaccagggagattccagagggattttctgaatgaatgccatatgctgatgggcagctcctgctaggaacagggtccctgctggcactttctgcaggcacccacggcatggatgatggcgcagatgggctggcagcatggctgtgttccgggtttcactttcagagcagtacctgcccttctcagccttgcttggtgttcttggaacacccctagaccagccccagaaggtgagtctgacgtccgccatgtctgctaggacccctgtccttggtcattcaagtcattcaataaagattcatgaagccaagccctgcttatgtcagtggaccagacagacacaatccctgctccccaggcggggaaagttagcaatgagcaaataaacgatgccacactgtggtacgtccctgatgaacagggcgatgtggcagagagtggtaacatcagctggggtggtcaggaaaagcctctctgaggaggttcatctgagccaacacctgaagatgagcaggagctgcggttttaaaatgtgtgtgtgttaatagcttcattgaggtataatagacacacagtaatcttgaccaacttaaagtataccattttgtaagtgttggcatgtatatacatccttctccacaaccaagatgaccactatatctgtcaccccagaagttttctcagagggacaacactttgcagagctgggggaacaagttttcaggcggagggaccagcgagcacaaaggccctggggcagggacaagcttggtggcatcaggagagaaaggagtccactagggagtgtgacggggtggccggtgccccacctggggccttctcagccaaggtgctgagctcaggtctgaatctaagtgcttccacaacaccctctcgccacactgggccatcagaatgccagggcctgccctccaccaaggctcttctgagaaaccagcccctgcgacatctgccagggacttagcaaggggtttctccaggaatgatttacattttaactgggaccttcaattccttgacccaagggagtgactagtgatggagcttcaagacctggatggacccttgatcagtttcttcctcagggctctatgttctcagccttcatgggatcgggtgtgctggtttcttgaaaattctgagttgcaagtcattatttgaagacaggggtgcctgtggccccttccaatcctccagcgctggtcctgggctcggaggctcttcctgcctgattgtcagagactcggcccatgtggaggagacagggagggtgggtaacgggaaacacaaggccaatccccttagagcaaactcccttacaacagatggctctgggggagcacagagcaggtcccaggcaccaagaaatgtgggctatcctttggccatcaggacgacgggatttggggatgcaagttttagcaactgcgaccaccagggcagaggctcactctagactcacaaacctgggtttgaatctggaacttactggatggcttaggccaatttcttctctgagcatccgttttcccatggattttttttttttttgacagggtctggctctatcacccagcctggagtacagtggtgcaatcgtgtctcactgcagtcttgacctctagggctcaagcagtcctcctttctcagcctaccaagtagctggaattacagtaagtaccaccacacttggctaatttttgcatttttagtagagatggggttttgctatcttgctcaggcgggtctcaaactcctgggctcaagcaatctgcccctcttggcttcccgaagtgctgagattacagatgtgagtcaccgcactcggcttttcttggacttttactctcagacctccctgcacggacgcacccatgggtgcgctctcctcgcctgcacctccgatgaagctgctgccaccatcggttggttccatttccttcttgcactcagtgtctctggttccatgattaatattggactaggcttggtttcctgagagtctaaatgactcacctccaactcacctccatttacaacggccctgctgagcaagaaggtctggggaagacggggactcctcgatagggactctcagcccacggagtcatccccaccaggctgtgggccttggccaagtctctttccctctctggtctcagcttccttcttcgtgtctctgggggatggaaggagatattggaaatcggaaagcccagctgctaggcccaggagttcatgagggttcacagccatgaggccaaggttaggtgaaaggtgcctgagctgggaggctggctgccactaagggaagggcttgggggatgggggccccctccagaggctccaactgagagagcatggccttcccatggtgctagtcacatcaacctgtttaatcctcaccagccctttgcagtagatcttatcattttcccattatagatgaagaaatggaggctcagagagggtgagcaacttgcccgatttacacagctagtaaatggcagagatagcatttgaccagggctgtctggttctaggacctctggcagccagaggaacagagctgtaaatgctctgcaggagccgccaggcccagaggaatccaggcctcccctcttccccaccggggccttgcaacaaaaggacttctaagcagatcattgaccctagcccccccattttacagatgagggcactgaggacccccaagagaaagtcatgcagctaaatgccaacctgggccacactggggctcctgactttccatctagtctttccacacctatcaagctggagccaagactgagcccaaatctggtgccagaggttgggggaagtgttcccacagagactgtgtgaccagcaggctgggccatggaggtgtaggaagtggtcacccacctgacatcacctgaggggccaggaaaggcctcagacccccaaggttccctcctgtgggcctgccctgcatgagtcaccccttggctggaacagtggatgtcatggtagcatgtttctcagaaaggggaacccccagccatgagcattttagctgtgctctggaatgggaggtctggggccatagcaggggcctggataggcagtgggagggggcaaagggaagtagagccctttccatgtctttcttgcatttccaagagctttctatgtccatattttattcaaggcccattacaaccttcagagggcagcccagtcatgcttcaacacacatctggcagaaggggaaactgatgctcccagtgttccccagcccctggtattcatgcccttgtgcagtccgctcccacactggggagagccagcctgtataaccaacagaatactgtggaaatgacaaaatgtgacttctgaagctagttcataaaaagcattgtgacttctgtcttgctcacttggggtcacttgctctggaggaagccagcgccatgttgtggggacactcaagcagccccatgggactgaagcctcctacccacagccgtgggagtggctaatcctggaagcagatgctccagccccactcaagccttcagatgactgccgccctggcccacatcttgatggcaatccctgagccagcatcaccctgtcaagtctctcccaaattgctgactcacagaaacagcgcaatataatgtttattgttttcagccactaggttctgaggcacatagcaatagataataatacattcagagaggagaaatgacttcccaaagtcacatggccagaccaggacttatacatcagtgctctttctcctggggaaagcaagggtgagagaggcctggggagggaaaagaaggcagctgaggcttcagagtcagacagggttggagtaaatcctagccctgccaccctcatgctgtgtgacctcaggcaagtgacttaactactctgagcctcagttcatttataaagtggggatagcaatactgacttgaaatcttgatgccaggattaaatgtctgaccaagggcctggtacacagcaggagctcaatgaatgacactgttaatgttactatgcagaatctttaagagcatccccgagggcctcacagccttccctcctgcccatgggaaggggcacaacaaacctagttctggagagccagtgcccctttgcttagtttccaaccaggcttggtctaggggtgtcatgcttgtgggtgtgcattgctggggttcacccaggcagctgagaacccctaatgttggtgcctcaaaagggcagggagatctggggatgtgagttggagggagcctgacatgggtcctgccgattaggactggtggaggccaagggtgacccagagaagcctaatggagagtcctactgctaccaaggctcccaagaaagttgctcagaaaaggtgcacctgcggctgggcgcggtggctcttgcctgtaatcccagcactttgggagaccaaggcatgcagatcacttgaggtcaggagttcaagaccagtctggccaacatggtgaaaccctgtctctactaaaaatacaaaaatcagctgagtgcagtgatgctcgcctgtaatcccagctactcgggaggctaagcatgagaatcgcttgaacctggggagggggaggttgtagtgagccgagattgcaccactgctctccagcctgggcaacagagtgagactccatctcaaaaaaaaaaaaaaagaaagaaagaaaaggtgcacctggacctattgaagaagaaaggccccagcctcccctctctgatttccagcctcctacctgccagctgctgcctgggccagaaagaaccctttatctgctaagggtattttggggccatttgggactcgggttcccagctgttggaggaagtccctgaatttcctgaaccaagttgggaccttgtgtcttgctcagcatcactttggggacacagattcccaattccccttggatggcttcctactgcattcaccttcctcacctttcctccaagaagcccaccgagctgagactgtgtgagcaagcgctcctcgctccccagtctcctgtagcccctcgggcttggcttccttccacagcttgctctggagggccccacgaccccacaacaaggactgctgctgtgccttgcacagagcctagggacttccccttctactcttcacagcactttcataccacctgaaacctgccgagggcacccgggggctctatccactgcctgcttttaagagtcccatgaatggctgttttccttggttgctaccagcccatctccccctgggatccagctggctccctggccacaaaatgtgccttccctccacttaagccatgtgtcagctactttcctgggcgccctgggggaattctggttctcaggagtacacagtttcctggggcagagggatgcatgaaccagtcattatggttatgacatgatgagatcagatctagaattgcggcacaaaaaatgacagaaaccactttttgactgggaagagggctgggggacaggagacactgccaggaaagcaacaaggaggaggtggcattggaacaggttaggaagatgatcaggagtctgtgtgcgtcccaggtggaggccagcgtgggcaaaggctggcaggggtgagaaggctgcacatttggctggagtataggtccaggagaagtaaaaaggcacaagggaggagtcagcccctgccaggctgtgagcagacttgtgcacccttgcatttgggtgactctgacccaggggagccactgcaggggttcctttcctgcagaatgggcataaaagtaggaccttgttcatggggttttcatgaggatacaagaaaccaatgcctgaaaactcttagcacaaaataagcactcaaaggtagctgttattgttatcattaaatgaataatataattttctacgtggtcctctgccaaaacacacaccatacttccgcaagggttctctacaggggagtgtcttggtgagatgtgtgtgctagaaaggtctctttggaaatccatggagggaaggatatgagggagagacaagtttccacaacatctatagatttatcctttttaatggatgtgcaatattccattaaatggatgtaccacaatttccgtaatcatttcttgttgtgaatctcagagtatttcaaaaatttataaataatatataaggaaatgttactgtatagttttcttttttctttttctagttttccagttaaattatttccttagtttttcttcactgaggtgaaattactgagccactcacaagtagtacacatttttttttttttttggcttttgctaaaaattgccatactgctttctgaaaagggttgtaacatttaccagcagagtatgaatgagtattctggtctcaccacaactttggggttggatttaccaaaattgtttttataaagcaaaaaaaaaaaaatgatgattgtatagatctaaaaggttatcaaaggttgcttgaatttgcatttctttaattactaaaaaggttaaacttataaaacttgtaattgatttttatttgtatttctccttgtgcaagctattttgatgctgttgttcatttatttattcaaaacaccagcccttctctctctctcttttttaattaaacaaaaaatagagatgaggtcttgctacgttacccgggctggtctcaaactgggctcaagtgatcctccaacctcggcctcccaaagtgttgggattacagatatgagccatgtcacccagctgccagcttttctacttttgtagtagaaagctctggactgggaagcaggtgtcttgcgttcctcctgtccctgtctggttctgtcattatcacaggcaggtcacttccataattgcttacctcattgtttaacatagtcccagctcaaacagcctaagatactgggcctggtacatccagaggagagtctggaagtgggtctcttgggaaggggcatgatggagcagttttcccaagtggagtccagcagccccaggagggttgagcatggagtggtcagttgtggagaccttgctgggaagttcctggtgggaggttatcactcctaccctatagggccttcacctgatggaggcctggtacctcgcaggacagatcaaggtagacacagaagccagagtatccttaggctattctgggctcagggaaaataactggcccacccttaattagagcacctaggactgcctgcctatttctgagccttggctttcacatctgaaaaccaaacaaaatcagtcaaaagaacccttgacctgtggcccacccagcagatgctcaacacagacacacggaatgtggaataaaaggagcaaagagaaaacccaggggatggggaagcactggaagggaaaatcattcaccagcaaatgagaacatagtacgaggaggcttgaatcatttctgttaggagagagtgccagccgcctcctccaggaagaaaactctaaagggtcaggcctcagggaaataaaatgatctataccatccatcagttcctccaacattcagtccatccatctaccaatccacccacccatttacccactcacctgctgctcatccatccatccatccatccacctatgcatccatccatccatccatctatgcatccatccatccacccatccacccacccatttacccactcacctgctgctcacccatccatccatccatccatccatccatccatccatccatccacttatgcatccatccatccacttatgcatccatccatccatccatccatccatccatccatccatccacctatgcatccatccatccatccatccatccatccatccatccatccatccatccatttatgcatccatccatccatccatccatccatccatccatctatgcatccatccatccatccatccatccatccatccatccatccatccatccacttatgcatccatccatccatccatccatccatccatccacctatgcatccatccatccatccatctatgcatccatccatccacccatccacccacccatttacccactcacctgctgctcacccatccatccatccatccatccatccacttatgcatccatccatccatccatccatccatccacttatgcatccatccatccatccatccatccatccatccatccatccatccacctatgcatccatccatccatccatccatccatccatccatccatccatccacttatgcatccatccatccatccatccatccatccatccatccatccatccacctatgcatccatccatccatccatccatccaccaatttatcatccactcactgattcattttacagcaaatgcttatgaatggggatgggtgggtgatggttgctttttctgcagtctccctaggccagttgtcccttccaaagaatctcaagggcatgggagaaggtcctggctgatcgtgtcagggacaggaaactactcacatttcaccgtttcttggggcaggagtggaggtgggggcattggaacccccttggggcctcctaatatcctgtgagtccccacctccagggccagaagctgcctgcctccgctccccgcagcccaggtgcggcgggcagcacactccctagagccaggaccactagttccgtcaaatccggggcgggccattcaaacagctaagggaggcgtctcctagtgtgccttttcctgagtcatctctgcacgtgtttgcccccttttttcttcgctgcttgtagctaagtgttcctggaaccaatttgatacgggagaactaaggctgaaacctcggaggaacaaccacttttgaagtgacttcgcggcgtgcgttgggtgcggactaggtggccgcggcgggagtgtgctggagcctgaagtccacgcgcgcggctgagaaccgccgggaccgcacgtgggcgccgcgcgcttcccccgcttcccaggtgggcgccggccgccaggccacctcacgtccggccccggggatgcgcgtcctcctcgccgcgctgggactgctgttcctgggggcgctacgagccttcccacaggtaagcgggtgacgggcgcctggggaggtgccggcggtccagagcccggacagtgtggggtgcgtgggacgcaagggaggacactcctcaccccgttccctgcccagctggagtgagggggcgcgggtgacaagcaggaacaccggaatatgctagcacccacaggtgggaggctggctgaagggctagtggtggggggcgcctccttctcaccccgcgatggctgggactgattcattcattcagtgtgaattggactgagagcactgccatacgcgggaggcgctctttagcccgcctacctgcgggcccgtcggggtcctgggcagatcaggtgaggccgtgggagtagtgggcaggccagatggggcctcccttagccatgggaggttggtcgtccgcgctctaccctgttgtgtgcgcggtcccgtttgcccccttcctaagctggccactggctggagggtcaaggaaaggagggagagttggctgtgggtgagagtggggtgagggtgcaggaccaccgggattagcttccccgatccgcgtccggcaaagcaacgctgtggattgaattcgctggagcacgtggtgggcatttgcccctggaagaaggtcagtggtggggctgaagtctatggtgggttgcctcagaattgagtttggggactgctttaggaaaactgagcacttaccagtggccagcgccaaattaatcactgtggggagaatgcaaagtaaccaggcgtgtttcacggagcccaggggctgctggagagagaggccctcagctgacccaggaccccggtggacccctgcatagaaccatagtaggtgcgagtggatgcctgctgaatgatacagagggaaaggaaggagcaggctgttagtccagcggtgggtcacggtgggggagagggaagacccagttcccctttaatcctacaggaagagaggactccatgctatggatcaattctagtcatctgaaccttaggcagtgggaggagagtggcagagtgggctttaggcaggagggaggaactatgcagcaaaggaggaactatgccctcttccatttccaatgggcaatgtgaggtattccccctttccccccaagagggcagaggggacaaagccctggctagagacaccctgtcccagctctgcaagccctcacctgggggaaggtaagagtttggagtgccaaggtcttggggagatgaagggaaggaagagatgtgagaggtgcttggggggctttgctggtttggtttggcagctgaagctcatgtgcttcctttctgtagagtgaagccccctccactttttttaatgttagagacagggtctcactctgttgtccaggctggagtgcgatcataactcactacagcctgaactctcataccaaaccttttttttttttttttttttttgagactgagtctcactcttgttgcccatgctggagtgcaatgctcgatctcggctcactgcaacctctgcctcccggattcaagtgattctcctgcctcagcctcccaggtagctgggattacaggcatgtgccaccacacccggctaatttttgtatttttagtaaagatgaggtttcaccatgttggtcagtctggtctcgaactcctgacctcaagtgatccttccgtctcggcctcccaaagtgctagggttacaggcatgagccaccacacccagcctcccataccctttttaaaataaaaatactatatatttaattgcacaaggaatatataaatatattctcaaagcaaaactgtaaacgctacagataaagccaagtcttttgacaccgcctcatcctgatcccttcaaagatataaccaccataattgatttggtgtgtttcctttgcagacctttataaatgcatgtccatatttatattgttttaatagacatatatatagttttccatatactataccctacagtacatatggttcttcatttggctttataatgtctatgaggcatcttggtgagctttccatgctgaaacttacagatcctctgcctatcttttaaaatgctatgtgatcttttgccaaatgggatgtttcatagtttatttatgtcctggatggatgggtgctaaggttgccaccattgttctttctttctttctttgttctctactacagtgcacagccctatatggatgcttttggaaataaatgtctgtgattctttcctagacaagagactgagaagagaatactgaggttgcagggcgaaaatgcattcaaattaaaagacaccaccgaactgccttccagggtggctggacaatttaccctcccgctagcagtgcaagagagtagtaactttcccacatcctaaccgacatttgatcttatcagcattttaatttttctcaatgtgattagtgaaaagggttatatccttgttgccttaatttgcatttctcgcctaccggggaagctgagcatctctctgggctcaggcactaggtcatttcttggcaggagtcagggagtccttggggaagggactacctgcccaacacagtactcctttttgcccctcaagccttctcccacttctgttttttccagtaaaggttcgggaagctcgttattttaaaaaaaaaatcccaaattagggcttgaatttccttgagtttaaaatttttttttttttttttgagatgaagtctccctcagctgcccaggctggagtgcagtggcacgatcttggctcactgcaaccaccctctcccaggttcaagtgattctaccgtctcagcctccctagtagcttggattacaggcacttgccatcatgcctggctaatttttgtattttagtagagatggggtttcataatgttggccaggctggtcttgaactcctgacctcaggagatccatccacctcggcatcccaaagtgctgggattacaggcgtgagccaccgcccccggcctaaatttttttttattttttgggacagtctcactttgtctcccaggctggagtgcagtggcgcaatctcagctcactgcaacctctgcctcctgggttcaagtgattctcctgcctcagcctcctgaatagctgggattataggtgcctgccacctcacccagctaatttttgtatttttagtagagatggggtttcgtcatgttggtcaggctggtctcgagctcctggcctcaagtgatcctcccacctcggcatcccaaagtgctgggattacaggcgtgagccaccgtgcccatcctgaagttcttttttcatctctatttgatttttcccaagacgccatcatttttcgcctggtattctgaggcaggaatgctttcttgctagctggcaccatctgagagttggcctctgatgcttcgtatcactgtcttgtccaattgtgtttttttgtaatatgacccaggattaactggtgcatatctgcagagaaaaatttattcccccatagctccatccttttcatccaggcaccatgtggtggggttgcggggcgggggaagccccagctttcctgtgaactctgtagacttagaaattccccaacatcatgttccttgccagtgctaaggctaaacaagccttcctcccacatccatgtacccccaattccagccagatgtaagcatctttgctctgggttagtgtgcaggctgggaccaggaaggttctcatgaaagtatcttagctggggccgggcgctgtggctcacacctgtaatcccagcactttgggaggccaagacaggcagattacttgaggccaggagttcaagaccagcctggtcaacgtggtgagaccctgtctctactaaaaatacaaaaattagctgggcatggtggcaggcgcctgtaatcccagctactcaggaggctgaggcaggagaatcgcttgaaaccagaaggcggaggttgcagtgagccagcactcccgcctgggtggcagtgagactgtatttaaaaaaaaaaagaggaattttagctggggtgatagaaaagctctatgtgtgactcctccatctagcaatttaactttaaaagcttagctagttactccatacagtgtagtgctaatcgtggaatttcagggagtggcaagagggcaggagagattttctggttttgttttgcaaaagggacatttccagggctgctcaaatcctgcagggaggcaaggacggcgggggggcgggggggggacctggagaggaggggaccctgaaggagtggaaggagggtctggcttgtcttaaagccatcccttcccagggcggcactagtgctctggggtcagggagtcgtgttactcagcttgagagcagtgagtgccggaaggaggggcgtttactgtaagtttctgcttctgctcccactcatatctgacttagactcgtttcttgagcagattgtgattcattctaaggtttttatactccctcatcacccttcttcacatcaggacaatcatcagaaggaaaatggggctgaaggatgactgtgtctggcccgggggagtcctggaggcttgagggtccttggcaatgacagtagatcagcccagcctgggccagcttgtccagccggtgcactgaccctgggtgtggcccatctgggatcacagtcctcatttcacagacaaggattcagtgcagaggcccagaggtaggggagagtcttgcctacagttccaggactggtcggggtagagcccaccacagactagacacgcagaatgtcaaaaaaaggcagctctcggccataccagttctccacttctctctctcccctcccaggtccacccaggggatactggggtgggggtgggggaccttcttccggtatctatggttgaaaaccactgggcattctcgtggccttgctggtggggagggactttttatacatggctcagtctagttactccctgaatgcctaagtcttttggtgacatgcaagtattcatgcatgcatgcatccagcagatctgaaatgagcagctgttctgggtcaggcatggctccagggacttgcattcagcctctgcctgtatgccccccgtgacaggatgcttgctccttgctgaggcagctcacaccatcctgggttagctttggcatttagatgatcttcatgatatgctgaaatctagtttctttttctttctttttttttttttgagatggagtctctctctgtcacccaggctggagtgtagtggtgcgatctcggctcactgcaacctccgcctcccgggttcaagcaattctcctgcctcagcctcccaagtagctgggactacaggtgcatgccaccatgcctggctaattttttgtatttttagtagagatggggtttcaccatgctggccaggctagtctctaactcctgacctcgtgatccacccgcctcggcctttcaaagtgctgggattacaggcatgagccactgcacccggcctttttttttttttttttttttttttttgatggagtttcgctcttgttgcccaggctggagtgcaatggcgctgtctcagctcactgcaacctccatttcccaggttcaagtgattctcctgcctcagcctcccaagtagctgggattacaggtgtgtgccaccacgcctggctaatttttgtatttttattagagacgggatttcaccatgttagccgggctggtctcaaactcctgacctcagacgagcccccccgcctcagcctcccaaagtgctgggaatacaggggtgagccaccacgcctggcctgaaatctagttttgaaaatgagtcacctccctgttcttcagaagcgcctctggcaatgtgaagactgtgactttgggtccccggagtctctcagccagtcacacacctgtcctccaacatttattcctcacgtagcgtgagctcaaggctcctcatctgcctgttctcttcaattcattcattccacaaacacttattgagcaccttctgcatgccaggaagcactccgggtgctgcgagttcatccatgcaccgcatagcagggtctctgccccacggaactgacattccacaggggtgacagtcaacagactgctgctagttgcaatgagaggattagaatcctgtagtgtgagagagacgggcggctccctaagatggggaaaacaggacttgcagacggtaacatacacacggaatgaaaagagggaggcagccagtgggagattagcagaaaagcatccaggcccagggggtaaaagccccaagaggctagaggaacaggaaggaggccggggtggctggagggaagtgagtggagaggggtggttaggagaaggtggcaggaaaggtggtagatcgtgcagacctttgtggactgtggtgaggtttttggcaggggagcaatactgcatgatagatttaaagttccttctgtctgctgtggggggctgggggattggggggagcaggcaggatgggagcaggaagccaggtcattgcattgatccaggggaggggtgagcagaggtgggaatgtgctttttcttcttttcttttctttttttgagacggagtcttgctctgttgcccaggctggagtgcagtggtgtgatctcggctcactgcaagcttcgcctcccaggttcaagccattctctcgccttagcctcccgagtagctgggactacaggcgcccgccaccacgcctggctaattttgtttttgtatttttagtagagacagggtttcaccgtgtcagccaggatggtctgatctcctgacctcgtgatctgcccgcctatgtagagacagggtctcactatgttgcccagtttggtctcaaactcccagggctcaggtgatcctcctgcctgcgcctcctattgctgggattacaggcatgagccactgtgcccagctggaatgtgctttcaagctagaatcaacaggacctgtggatgggtctggtgggagcgcagagggcaggagggaaatcagggatcctgtccgtatttgggagctcagaatctggctgcatggaggtgtcattttgggatgtgggaaaaaacaagcaaaggatagaacaggggttttggagaaaagttctattttgcccatgctcaagtaccagtgggggttgggtgttgaaatgtggagctctctacagagttcaagctgctgatatgaatctctgggtaccagagtcaactgtagaagtcctggtgccacctgggccaaagaccactccccagtagactcaccttacttctattaaccaagcccaagaccccctttttttggcccccacattatctgttcattcgttccaacccaagcctaggctcttttattcagcctggttacagtatatgctagttttcttttgctgctatagcaaattagcacacatttggtggcttagaacaacatgaaggtattgtcttatagccctggtggtcaaaagtctatgacaagtctgtaatcccagcactttggaaggctgaggtgggcagatagttggggccaggagtttgagaccagcctggccaacatggcgaaaccctgtctctgctaaaaatacaaaaattagccaggtgtggcggtgtgtgcctgtagtcccagctactcgcgaggttgaagcacgagaattgcttgaacctgggaggcagaggttgcatcaagctgagatcgcagcactgcactccagcctgggtgacagagcaagattctgtctcaaaaaaagaaaaaagtctatgataaggcagcagagctatttttcttctggatatgctgtagcaaaatgtttccttgcttttttccagtttctagaagctgcctgtgttccttggtccctggccctgcatcactctgaactctccttccatcctcacatttcctctctctcttttttttttgagctcgatctctcggctcactgcaacctccacctcctgggttcaagtgattctcctgcctcagcctcccaagtagctgggaccacaagcacccgccaccacgcccggctaatttttgtatttttagtacagacaggtttcaccatgttggccaggctggcctcgaactcctggcctcaagtgatccacctgccttggcctcccaaagtgctgggattacaagcacgtgccaccatgccagctaatttttgtatttttagtagagatggggtttcaccatgttggccaggatggtttcgaactcctgacctcaagtgatccacccattttggcctcccagagtgctgggactataggcatgagccacctttgagagacagtagagcatttcgttaaaggtatgaacttttttgtcagcctgtcaaggttatcccttgcttctgacactagatggtgacttgagcaagttaagttacctctgtgtgcctcggtttccccatctataaaatgggctaataacagtagctaccttgtattgtagggctggtgtaaggatgacatgagttaatatgtgtcaagtgctgagagcagcttctggacacagtgagtgctgtgcaaataaaggtgagccttattaggtgcctgttgtatgtggggcattatggatacagccatggagatgaaccagttccagtccttgccctcgatggggggcagtgtgggaaggggaatacagaagagagggtggccagtactgcgtaggggactgtctggggcctgcgggagtccagaggagcccatctttacttctgcctgggtcagtaggggaaggagcctccagagtttgcagtgatgaggctctgcaccacagatggtgccattgtccttgccagctttgcccagggctctggaggcagcagaaggggtcagaggttaaacagcacatcagtgctggtggttggggcgagcctggggcctgctttggaagccccacccagcaggttccccttgggttcttgggtcctccagggggctaagaactcctagaggcgtcgcccacagcttcatttcagccatcaactttcttgacggattgctgcctgccaggtacggttcctgctctcagagagtgcgtgcacagataatgtggcctccacacagtttactgaaatggttccaacctgctgagaccaggaaactcctaaaccccaccttcaccttcccagcctgggcaggcacccttcccactcttgattcgggtgagggaggccaggacgcagcggccaggccaagagtttcctctctctccaaacggtctggggggcatgtgccctgccccttccccacacatagtctgggagagggaggtgggcaaggaaacacaccaggctgggcgccaaggctcacgcctgtattcccagcattctgggaggccaaggcaggaggatctcatgagcccaggagtttgagaacagcctgggcaacaaaaaattagccgggcatggtggtacacacctgtggtcccagctactcaggaggctgaggtgagaggatcacgtgagcccaggaggtcaaggctgtagtgagccgtgttcatgatcgcaggactgcactccagccagggtgaccgcaaggccctgtcttaaaaacaaacaaacagacaaacaaaaagtaaatacacaagccccttctgagcaactggcctgaggctggcgcaggaacctaaggcacctccaagaggatcagaaagtcgaatactcccagggagctgggccccgcttccttttccttcaggtccactatatccatctctctctctcttttcttccttccttccttcctttcttcttccttcttcttttcttcttccttccttccctccctccctccttctcttctttctttctccctttccgttcctttccctttcgttttccctttccctttccttttccctttccctttttctttttcttttttttttttcattttcttgacagagtctcactctgtcgcccaggctggagtgcagtggtgagatcgtggctcaatgcaacctctgcctcccgggttcaaacgattctcctgcctcaggatcccgagtagctgggattacaggcgcccaccaccacgcctggctaatttttatgtatttttactagagatggggtttcaccatgttggccaagctggtctcaaacgcctgacctcaaataatctgcctgcctcggcctcccaaagtgctgggacttcaggtgggagccaccgcacccagcccactgcatttttctttgtagctgccattgtcccgtggcggctgttgctgcccgggaacgtacttcagggctgggtgggttttaccttgtctgagttgtagctaaggatgcagctccaacacttgcttcggccctggaatcttcaggatccctgcagtctcaacaattggctcatggagccggcacgggattgctgggaggcaggagggatttcttggtgggaagtgaggatcgaccagttgctaaattcggactcaaggcgtgatcttgctaaaacggactcgctctcctccatcctgtccacctccccaccacattaatgaccctgaaaccctttaatgcttccctagtgccaaaggcaacatgtcccaaagtcaccttctttctttctttttttttttttgagacagaatctcactctgtcacccaggctggagtgcactgatgtgatcttggctcactgcaacctccgcctcccggcttcaagagattctgctacctcagcctcctgagtagctgggattacaggcgtgcaccactacgctaggctaatttttgtagttttagtagagagggggtttcgctgtattggccaggctgttttcaaactcctgacctcaagtgatccgcccgcctcggcctcccaaagtgctgggattacaggcatgagccaccaggcccggcctcaaactcactttctggcaatggcagttctgagaaaaaaggttctatggccaacgaagtgggagaaacattgcagagttttctgactagctcccatacccttccttggagaatcaaatagtaagtaaccacatcaaggttctgagaagccccgtgatctaaaatggaaacctctcgaatggactccagtgattatttgtgtttgtttgtttgtttatttatttatgagacagggtctcactctgttgcccaggctggagtgcagtgttgcaatcatagctcactgtaacctggaattgggggctcaaacaatcctcccaccttagttccttgagtagctgggactacaggcacatgccaccatgcccagctaattaaaaaaaaattttgttaggccgggcacagtggctcatgcctgtaatcccagcactttgggaggccgaggcaggtggatcacttgaggttacgagtttgagacatggtgcaacccaatctctactaaaaatacaaagcttagccaggtgtggtggcacatgcctgtaatcccagctactcgggaggctgaggcaggagaatcgcttgaacctgggaggcagaggttatagtgagccgagattgcaccactacactccagcctgggcgacagagtgagactctgccaaaaaaaaaatttttttttttttttaaagagacagggtcttgctatgttgcccaggctggtcttgaactcctgggcttaagcaatcctcccaccttggcttcccaaagagctgggattacgggtgtgaaccgctgcgcctgtccgtgttctgcctatcatctgttaccatccggtagccccagcatttgatgaaacgctgtttgggaaatgacagtgaagagcttccatactcatctctttttctgactccctgactctctcttctgcctccctcttgcatttttaagttcccttaaattgcactgggctcccctggataatccagaagaatctcccatctgaaagtcagcgggttcacaacctcgatgccatctaccaccctgattcccctttgccatgtaaggagacgtatatgagcacatatgtgaatatatcaccctaggtcctggggacccagtgaggatggtatgattcttgctaactgacagagcaggagcgtcaccatcttggacaagcatcgccgttttaaattctccttgattaaaaaccgcctaaatccagccccaaaacatcagcctaacggctaacgtcagcatgaccataaaccacaaatgacacctccaaccagaaacattccaacacccccatccgactggagacatgccagccctgagataacctcccctctgaccagagacattcccagcatacagtaaaactctcctccacacagaaacattcctagcctgcgaaaagctcccatcccagaacccttaaatacccttagtccataaaaacaatgctgctgaacgaaattggccagaaggccttcttggttttattcttttttttttctttttcttttttttttttttgagatggggtttcactcatcttgcccaggctggagtgcagtggcgtgatctcggctcaccacaacctctgcctcccgggttcaagcgattcttctgcctcagcctcccgagtagctggaattacaggcataagccaccatgcccggctaattttgtatttttagtagagatggggttttaccatgttggtcaggctggtctcaaactcccgacctcaggtgatccacttgccttggcctcccaaagtgctgggattacaagcgtgagctaccgtgcccggcctcagttttattctccaaaataaacctgtctttggtaagccgcttttcatatttttttcttctttcttcaactcttacacaaaaatcatttcaaggtgcttgcctgtccctgagttccttccagccagggactccaggctccaccctctatgctgtttccgtgtccactgtctttgggttttatctccaaccctggggccaggcagcatggggccctgcacactctttctcagctgtgcaggaactggggaaaactcaactcggcacctgcttgcagtgggacaactgtgagaggtgctgcctgtggccagggatggagcctgtggccagggatgggtgtgtttaaagaggtggaggaggaggactttagtttcaggtagtctcttggtctggagctcaagtgagcactgagtgtggagagaggggttcagagtcctacagttaggaggtgactactgagttcggcgtgtggtggtatagtctagtggttgcttaggagcgagggtgtggcggtagacgcatagtcccctaaaacgtccatacattctacattgttaatttgggacagggtctcaccctgtcacccaggctggagtgcagtggcccaaccacggctgaagagattctcccatctcagcctcccgagtcgctgggactacaggtgcattccaccacaaccagctaatttttgtatcttttgtagagacgggtttttctcctttgccgtgttgcccgggctggtctcaaactcctgagctcaagtgatcctcctgcctcagcctcccaaagagctgggattataagtgcgagccacttcgcctggccaaatgtccacacattctaatccttgaaacctgatactatggatcttgagacaggaagatgatcctggattatcagggcgggcccaatctaatcacaggagtccttaaaagcagagaacccttcctggctgtgttagagagagatgatagaggcaaagagagagatgtgatgtgagaaggactcagcccaccattgccggctttgcagatggagtaagggggccatgagccaaaggatgccacagtccctagaagcagggaacagcccttagttggctgtcagcaaagaaacaagacctcagtcctacaaccacaaggaactgaattctgccaacaaccttagtgagcagggaaaccaacagtcccttaaagcttccgctaggcacacagcacatgacctggatgggggtgatcagagagggcttcccagaggaagtggcactcatgagtgaggtctcaaggatgaatgggggtacactggatttagggaccagtgcaggcagggaaacagcacgcacaggctgctgcagggagtggggtgcccgtggggtgccagtggcaaaaagaggctggtaggagagagtaccaggggcttcacaggcaggcaaggagggcagggcttcttgggccactgttaagactttggttttttttttttttaaatatggaccgtttcatgaatttccgtatcatccttatgcaggggccatgctaatttctgtattgctccaattttagtatatgtgctatcgaagcgaacacaagactttgggctttattcatagctgggttggaagccatctgagggtcttcaataggatggaggggaagacagtagatcgtgttttcaaaagatcagtctggtgtctgcactgtgagctgggcgtggtggatggggtagacgagaggagaccctcgggtggtcactgtcaagtccagatggcgggaaggtgaggaagagctggtagatgtgggggtaaaactgcaggttaaacagacagaactagtgataggttgggggccagggagaagcaagcatttcaaaaagcagtcagtctcggccaggcatggtggctcatgcctgtaatcccagcactttgggaggctgaggtgggtggctcatttgaggtcaggagttcgagaccagcctggtcaacatggtgaaaccctgcctctactaaaaatataaaaattagccaggtgtggtgccaagcgcctgcagtcccagctacttgggaggctgaggcaggagaattgcttgaacgcgagaggtagaggttgcagtgagccgagatcgcaccactgcactccagcttgggcgacggagcgagtactctgtcttaaaaaacaaaaacaaaaaaaccctcagtctcatggggagtggggagcagggatctcagagccctgaactacagcacccccccaccccaggcagcagaagctggcggatcagagcacgtgccaaatcctggccctaacactgaccagctgtgtgactttgggcagatttctcgtccttacgtctcagtctcccccatctgtaaaatgggctgacagttgttggctattagaattactttcgctatggaaagcaaaccgttccagcatttgcacttctttctgctcagcttctgctaggtcagcgcatctcaaactccctggggctcttgttaaaatgcagattccaattagggaggtctggggttctgcattttgagaaagttccaaggtggtgcccctgctgctggcccggggcctcaccttgaataacagagcgcacagcggtggagatccccaggagacagggaggggaggggtgcttacctcgctggccctgctcagctctggccccttcggggattttgcatttgatctaactccccgctcaccccacaacttctagactcgtctcccacaggtatggtccggctgagaccaggtggggctttttgaaagtgaactttaactggtcttgtagggaaaaccaaaccaacctgaaaatagacagacctgaaaatggtaaggttttaggccaccctctctttatcttgatgccactaaggtggggcggagggcctccggttgcacagctcattaccttgtggacacctcactttgccttgaacctgcggggaactccacccaaaagccccccctccagtccttgggcttccccctcccactcttcgctttctgatccctccttccctcccaggcaagggcccgagcacatcccagctcccctctctctcttccccagggcagcaggagctgatgagccaggcagggtgggcctggaaattcacagggccagacttctccgggcagcggcagacgccccggcccttgcctccttctccaccgggagctgggacaggtgaagggcctgtgtaaggggaagggggtgccccttcctcgctcagctccacatggaaaatggggccctaagtcctctgctcctccttccaaggggatttgagaggcacaggctggccatcccaccaggttgagatcccacagcccctccgcacagcaagaagactgccctccggtggcaagctatggatttaccgagaattattgctgaaaagaagccaccacctcccagcatttcgtgtccttgagatgctatttacatatgtggctttgtacatctgtgttctcactctctttacatatacttatcactactttatttttatcactactttattttttaattctctatttttttttttttttttgaggcagggtctcactctgttgctcatgctggagtgcaatggcgtgatctcggctcactgcaacctccgcctcctgggttcaagggattctcccgcctcagcctcctgagtagttgggattacaggcatgcaccaccatgcccggcttatttttgtatttttagcagagacggggttttgctacgttggccaggctggtcttgaactcctgacctcaggtgatctgctggcctcagcctcccagagtgctgagattacaggcatgagccaccgtgcccagccaagatgatcccagttttgttggcaacatccaaagcattgtaatcaggagccagtggaacatatgccttcttctctccatccggccgaatcagggtgctgaccttggccacatccatgccatagagctttgtcacagcctgtttgctctggtacttgttggctttaacatccacagtgaatacaagtgtgttgttgtcttctatcttcttcatggcagactctgtggtcagtgggaacttgatagcagagtggtcgagcttgtttctcctgggaacgctctttcgaggatatttgggcttttaatacctatttttatttatttttttgagatggagtttcacccttgttgcctaggctggagtgcaatggtgcgttcttggctcactgcagcctccacctcccagattcaagcgattctcatgcctcagcctcctgagtagctgggattacaggcacccaccaccactcctggctaattttttcgtatttttagtagagacggggtttcgccatgttggccaggctggtctcaaactcctggcctcagctgaccctcctgtctcattctcccaaagtgctgggactacaggcgtgagccaccgtgcccggccctgggatttttttattttaaagatgggtagcctgtggcccagagatgggggagaattggggacacggtgaagctcaaacctctctgcacttagttgctgtgtgaccttgggcaagtggctacacctctctgggctgcagtttcctcatctgtaacatggggtagtgatctggccccaaagagctagcagtgtgtaaaggaggagttgtgtgaaagcaggcacccaaggccagactcgggggagtaatgtgcaataccatgggctccccattctctgcaccccctacccctccattgacccaggtgtgatggcaggagggaagcataagcagccagagccccccaggtgtgccccaggccccagcagagtgagcagggcctgggcccatggtccccatagactccgtagctgtcagtgagattagcaggcaggccgggaggggagaccaaggacaaggacccagaatgttcccacactcagcaggccttgccagtgagccctcacacctccagccagccccaggcccaggctactgaactcacccagtgagatgctgtgggttaggagcacttcgggtgtcctggcaggttcctgcccccctggagaggctcccaggagccctctgggtgacttaagagaggacactctcctctcctactggagggaggagggtgtcctcaaggcccggggctctggattaaataagaagggagacaactcaagcgccatgtgactattgggcaaatatcacgttcatgtattatttcaaattaatatggtgacatgtttcagacatgcaaaaaaaaaaaagaatgatgtaaccaacaccccatttatccaccttccagccacgctgctgctttctgctgcttcctgaacatgccggaagcttcactgctccctcgagtggagagaagagtcaggcagccctttaggccagccaggcctctctcctggggaaaagtggcttctgcttccttccctaaaccaagaaagccccacatcgcaccaggggccacctcctttctgccaggcaccatcttggatgctgaagacatggaaatgctacaaggcttcctccctgcctcttgcctcacttcctgcttcccttctcttgcctcacttcctgcttcccttctcttgcctcacttcctgcttcccttctcttgcctcccttcctgcttcccttcttttcccttttgctccaccctagaagtttcacatcctggatcaccccagaaaagtgcaatggcgttcccctgtcattccatctggaaagacaaaactccttccctggaatctcaacaaagaatttcctctcttgaatcctttcttatgatggtgcttcactttcaaagaacccttgaaacacatggggggcttggtaaaaacatatcttcctgaggccgggccaggtggctcacgcctgtaatcccagcattgtgggaggctgaggcaggaggattacttgacctcaggagtttgagatcaacttgggcaacatagcaagacccagtctctacaaaaaaataaaacattagatgggtgtgggggtgcatgcctgtggccccagctacttgggaggctgaggcgaaagagaggactatttcagcctgggaggctgaggctgcagtgagccatgattgcaccattgcactctagcctgggcaacagagtgagaccctgtctcaaaaaaaaaaaaaacaaaaacaaaacaaaaaaaacccccacaaaaacccacaaaacaaaaaccacgccttcctgaaaagagtgagcctctccgacccctacttcacaccatgtacaagaatgaaacttgaatatgaacgattaaacaatctcatctaggagttaatgtaggagaatatctaagtgacactgagtgggcaaatatttcttaaacaggacaaaaaaaggcattaaccataaaagaaaagattagtatatgtaatttattaaagctaagaatgtctgttcatcaaaagcctccaaaaagaaagtgaaaaggcaagccagaggatgcgagaagatacttgcagtacatataatcaacaaaagccgtgtatctagaatatgtaaagaaccctacacatcaataagaaaagccagacaacccaattaaaaaaaaatggccacaagacctgaataggcatcttacaaaaaagaatgcctaaatggttaataaatgtgggaaaaggtgcccaacaacattacttatcagagaaatgcaaataaaaaccacaatgaggtatcactacagatccaacaagatggctaaacttttaaaaactgataccaccaagtgctgacaaggatgtggagcaattggaatcctcagacactgcagggaagtgcctactagtacgactactttagaagcctggatggagaatctatcagaactgaacatgccttatgccccagcagttccactcctaggtatatagccaacaaaagcgtgtacgtttggacactaaaacgtgtgtacaggaatgttcccagcagcactatcataataaccaaaaagtggaatgtctatcgagagcaggcccggagtggtggctcatacctgtaatcccagcactttgggaggccaaggcgggtggatcatttgaggtcaggaattcaagaccagcctgaccaacatggtgaaactctctctgctaaaaatacaaaaactagctgggcatggtggcacacacctgtagtctcagttacttggcaggctgaggcacaagaatcatttaagcccaggaggtggaggctgcagtgagttgagattgcaccactgcactccaacctgggcaatagagcaagactctgtctcaacaaattaaaaaaaagagagtagactagacaaataaattgtgcatatttgtgtgatgctatactgcaaagcaatggacagaaatgagcaactgttatttgcaacagtgcgaatgattctcacaatataatgctgaattaaagaggccgattgcaggggaatggactgcgtaattctactttatgtaaaatccaaaagcagtcaacactaatagagcgatagaaatcagccttttgggaggagtgtgtgggaggggggatgacggaggagctggggctggcaaggtcccatttgatgagttgggtgctgattgcctggtgcgttcatcttgtaaaaatgcagttggctgtaacttgagatctgtgcacttttttgtacgggtgtgttagacttcaacaaatacgtttaccagaaatttgtattgttgggcccatcccagagacaaggtaggaagcaattatgttaatcccagggcaaggggatggtgactagccccaggtgaaggtggtgatgattatggtatgaaaagggccaggagaatttgctgataggttgtttgagaggagagagtcaagggagacgctaaagtttctggcctgagctggagtagcagggggaagcgtaagggcggtgtgggtttgtggaatcaggagttctcgtcctgatttctctcctatattacaaagctccgtctcaggcctcctgggactggtggggacagagggagtatggatatctgggatccacctggcctcaccagcttttctgacctgccaggatcgacccttcgaggacacctgtcatggaaaccccagccactactatgacaaggctgtcaggaggtgctgttaccgctgccccatgggtgagtgggggcgttgggggtggggagaaggggggaaatttgtcctcaattgatgaccctcttgggggattgatgagtggggaaattggagccaaccgtcatcgtcataattggctacagttttctgcaggtcattcctagtgtcgcggagtccaaggactctctcggaaggctagggctgtagaattgagactgtgtttcttgctgccaccagaatgtccatctccatgagtttttatttttaacgtagagctgccctttattggacacttactatccatgagtccgagacctttatatgcacggcatcatctcattaagtgcttgcaatgatcctttattacactcaatttgcagatgaggctactggggcttggcagggttaagttccagctacttcccttgatgaccagggtcacacagttgggaaatggtggaatgatcagggctggggcccagggctcagagacctcaaagcctgggctgtcaacatcctctgaccacccttcatttctggggcccagaagtcctttgcagttctttcttttctctcttatttttatttttattttttttgagatggagttttgctcttgttgcccaggctggagtgcaatggtgcaatctcggctcactgcaacctccacctcccgggttcaagcgattctcctgactcagcttcccaagtagctgggattaccggcatgcaccaccacacctggctaattttgtatttttagtagagacagggtttcgccatattggccaggctggtctcaaactcctgacctcaggtgatccacccgcctcagcctcccaaagtgctgggattacaggcatgaaccaacgtgcccggcctaatttttttatattaatttaaaatagagacaaagtctcgctatattgcacaggctggtcttgagctcctgggctcaattagtcctcctgcctcagcctcccaaagcactgggattacaggcatgagcctccatgcctggcctctttgccgttcttgactgccccagctcaggacaggtgtttatcctgggacaacctggacaatagatttctctgagaccagtctcccagaccagagctccctttctggaatgttcccccacccccagcaccgtgattgacttctagtcaattaccaggaaatccttctggagctggggtgagtgttgttccttccattttgtagatgatgcttaggcccgaggagataagcagctggaatagggtcatgaggcatttctgcccctgtggttattatcaaaagtcccaaggcaccaccagtggtcttagatgggcggggcaggacataacgatgccctcgtggtctctgacctccaggaacagagattgtcacggggacatcagcctttagctgtgccagcaagggtgggagggagtctgtgtgtgtctggttcatcatcgccacttcttgctttgaggacagcaggccattgcaagtgggcgggcatcgtctggagggcttccgacagtgggggcggaggggcccatccacccagctgtactgtctggagggtggtgacaggttatggccatcagggctattccactggagctgcgcgggaacccaggtcagtcagttcctagacttgtggcctcaactcccccatgagatgcagaccaggctcgtgctcaggccaccaaaggacagagggaaacattcttggaaagaatttgatgtttttgtatttgattttgatttgtatttccaacaatgattcaaagtattcattgtatgggcaaaagtagtgggttggatgctattggactttcttgcttttatttttggtttagtgttgattttgaatgatctattaggtgggtcccctggttttttcagtgcttcactggtcggccatccacccacccatccaagtacctgcccccctcacccacccacccatccaagtacctgcccacccacccatctttttaaccactcaccaacccacccctcccatcccctttccatttttcttcccatctagccactatccatccatccatctgtattagtttgctggggctgccataacaaaatactgtagtctgggtgacctaaacaatagacatttatttcttacagttctggaggcttgaaggtccaagatcaaggtttttggaggatttggtttctggtgagggctgtcttcttggcttgcagatggcagtcttctcatggtgggaagatcgatctctctctctctttctctctctttccccctcttcatatatgccaccaatccccctggattagggccccatccttatgacctcatttaaccttaattatctcctaaaagtcctatctccaaatacagtcacactggggttagggtttcaacacatttaacatatgaactttgtgggggacacaattcagtccatagcaccatcgccttcccatatccctccaattatcctcccattcaccgcccccatccatacacccacccctctcctggccattttctcatctacctttctatccatccatccatccatccatccatccatccatccatccatccatccatccatcatccatccaacaaatttttatttctctctctctctcttttttttttttttttttttgagatagagtctgtctctgtagtccaggctggagtacggtggtgtgatcttggctcactggaacctccgcctcctaggttcaagcaattctcttgcctcagcctcctgagtagctgggattacaggcatgtgccaccacacccagctagtttttgtatttttagtagagatggggtttcaccgtgttggccaggctggtcttcaactcctgacctccagtggtctgcccgccttggcctcataaagtgctgggattacaggcatgagccactgtgccaggcctagtttctgggcctttggacatgcctgtccccatgtgggatgccctcccctccgtccctacctgctgcaattctggaaccccttcctccatgaggccttcccttgctagcctgatggttggtggtggttcccactcagttctctcagggcccgcttgctgtggtttttatcctctggaatggagtggcccacagtgttctatgacttttcatgggacccacaatcccagccacaaggagaaagacacttccttctcatcctcttctggcccctttgactccagcctgaaagggccttgatggggagtgggtggagagaaaaatgacatctcaggtcccaggctccctccacttaaaagctgtgacttaggaagagggggctccctcctccccacttcccctctctaaggcccagtgctggctggggctgaatactccatattggtgtggtgggtggggcattttactggtgttttattgaccttgtgcttccgtgtagccagagaagaaaaaagaaaaacccacaaaaaccccttctttgatctctcggggaaatttcttgacattttgcctgccctgtgcagccagcactcagctgtgtggccgggtttgcttgtgggcgggttggtggaggaaggaagctgagggacctttgagattgaaaaatgtagatgtcatcgaatccctccttgcacccaggcctgtgatgccctctccagcattcctgagagcaggtccccagccctttgcttacatactcttggtgacggggagctcattcactgactcataacaatgaccacgattcataccgatggagcacgctatgtgctggccactgtgctgggccctttaccgaccttaagttccttcaatcctgataagaaatccagagaggaaacttggacaccgaggggttcaggaatttgcacaaggccacatgcgtatcagtggctcagccgggccgtgaacatgaccaccgagtgcagtctcctgagctcttcaactgtagttgatactgaccctcaaggcctcgaatttgggaggcagaagagtttacgagtgaagagctaatgcgggggctacaaagcccttcctgttctccatcttcctggactaccctctctttgtgtgcagactcgctccccacaggaaggggtctctcctgcagatgtttgaggcctgcccaggttcaggggaaggatgtgaggccaggccaagtgttaggtagggagcatggcaggtgtatcccatcttgtcccaggagctgagggttcctccgaaggctgtgaacaggaaggaggaggaggagggggtttgtgggttcccccagcttccgctgcccttgggtaaagctcagctttgtgcatgggcacgcccatttggcatgacagctgctgcccctgccgcctccccctcccccgcccagtccctcttcatcctgggcttcagctgagtgtgctgggctcccctgtgccctctgacactgtcccagcagagccccctcacagcacctcctggccccccactgtccctgtgtgcttgactcacacctctgcattcctcagggtccacttaagtgtaggccctccctgaccccagcctgggccacagagcgagattctatctcgaaaaaaaagagaaataaacatttgttggatggatggagggatggccctccctgaccccaagccagctcagaggtcttggctctgggctcttggtgcctcccatggttccactttcctaacactccttccatgtgtcatgacttgtctatcgtcttcctgcaggatccccagccctgaccccagggcttggcacatagtagagtctcaatttttgaaagaataggtgaatgaatgaatatggctaacttgccccgcatactcttctgtgacagccagccattgcctcacagggccaagcttccattgtccccctggcacctccctctgctgaagtcagaccagcctctctctcctgtccatcccactcgcaggtacatcctagtcttttctttaagcctgaaaaatccaccagggttcttttgtataggaggaagtatgtgggcgtggaagggaggaaatggaaggcagtagaaggaaataggactggcccaatgcagcaagcatttattgagctctgttggatatagggttatttgggggagagaaggacaaggtcctgcctcctgggagcaacccactagtaggggaggtgacatgcttatatatatctgatactccagagggtatctgtgctaagatagtttcaaaggaggaagaatgggagcttacagtgaggaaaagcccctataccactggtctgcatccacccatccatccatccgttcatctacacatccatctacccatccacccatctacccactcatccactcttccctaacccatccatctatccacctatctacctgcccatccacccttccccatccatccatccatccatccatctacccatccacccatctacccactcacctactgttccctaacccattcatctatctacccatctacccacccatccacctttccccatccatctatctacccatccatctacccatccatccatctacccactcatccactcttccctaacccatccatctatccacccatctatccacccatccacctttccccatccatctatctacccatccaaccatctacccactcatccactcttccctaacccatccatctatccacccatctatccacccatccacctttccccatccatctatctacccatccaaccatctacccactcatccactcttccctaacccatccatctatccacccatccacctttccccatccatccatccatccatccacccatccgtctacccatccacccatctactcactcatccactgttcctccacccatccatccatctacccatctacccacccatccacccttcccccatccatccatccatccacccacccactcatccatccacgtacccactcatccatccacccacccactcatccatccacccacccactcatccacctactcgtttatccattcacctatgcactcactcatccatccatccacccacccacccactcatccatttacccacccatccacccactcattcattcattgattcacccaatatgttttgtgtatttgcattctatcagaccctagagattcaaccatgggggggcagctatcatcttgccctcacaaactcaatctcaataagacaaatattataccaatttgagacttttctacctgcttgtaagaaaagggggtgccatagtttgaattcccccagaagtagactgttatgggctgagtcatgcccgtatcccccaaccaattcctatgttgaagtcttaaccccagaatctcagagtgtgaccttattcggagatggggtctttaaaaaggcaattgagttaaaataagttcactaggataggcccaaatccaatatgactggtgcctttataaaaggaaattaggacacagatatacacagagacaagactgtgggaggacatggggaacacagtccatctgtaagtcagagagaaagagctcagaagaaactagccctgcccataccttgattttggacttctggcttcaagagctgacaattaatttctgttgtttaagccaccctgctgtctgtcgtagtttgttatggcagcctgagcagactgatgcacagactttgaggcaatgatctgagtacagttggtgatgcctggaaacaccaatttggaagtagggaagtggcagacggaagggaaggcagcttataaagttgtgttagaaagctagttactgctgtgggcaactggggcttaatccctctgggggcctctgggagccagtgcagaacagctgagggtgagggagctggggtatttatatgccaatgtccatcaaacattggtggaactgctcctggggtggtacatcttggtaggtctggcctgccacaccctggcagagcaggctctgggtgctctgagagggtgattttaaagggacccagagagaggatctgggtggggtcagatgatcaggaaagttccatgagaagatggtatttcagcctgatctggctgggtgtgaagggttcccagtgggtggaagatggagaagccacttagcctgcaggaagaacatttgtgttagtttgctggggctgctgtaacaaagtacctcaggctgagtggcttaaaccagtggtccccaacctttttggcaccagggactggttttgtggaagatgattcttcccatgaaggggggtcagggatggttttgagatgaaactgttccatctcagatcatcaggcattagagtctcatgaggagcatgcaacctagatcccttgcacgtgcagttcacaatagggtttgcgctcctatgagaatctaatgcagttactgatctgataggaggtggggctcaggaggtaatgctcgctcaccgtcactcacctcctgctgtgtggccccgttcctaacaggccatggactggtactggtccccggctggggactggggtcgcctggcttgtggcagcataactccaatcttcacatggcattctccctgtgtgcacatctgtctctgtgtccaaatttccccttttcttatttattttatttcatctgtactgtattgtattgtttcagagacagggttttgctctgtcacccaggctggagtgcagtggcatgatcatagcccactgcaacctctaactcctgggctgaagtgatcctcccacctcagcctttctgagtagctaggagtacaatgtgacatcacacctggctaattttctattgttgtagatggggtcttgccttgttgcccaggctagtctcaaactcctggcctcaagtgatccttccatttcagcctcctaaagtgttgggattacaggcatgagttaccgtgcctgaaaatgtccaattttccccttttcttttatttttcttgtcttttttttttttttttgagacagagtctcactctgtaacccaggctggattgcagtggcgtgatctctgctcactgcaagctccgcctcccgggttcacgccattctcctgcctcagcctcccaagtagctgggactacaggcgcccgccaccacacccggctaatttttttgtatttttaggagagacagggtttcaccatgttagcgaggatggtctcgatctcctgacctcgtgatccgcctgcctcgacctcccaaagtgctgggattataggtgtgagccaccgcgcccgacctctttttattttttttgagacagagtttccctctgttgcccaggctggagtgcagtggtgtaatctcagctcactgcaacctccacctcccaggttcaagtgattttcctgccccagcctcccgagtagctgggattacaggcacatgccaccatgccctgctaatttttgtatttttagtagagacggggtttcgctatgttggccagggtggtcttgaactcctgacctcaggtgatctgcccgcctcggcctcccaaaatgctgggattgcaagcgtgagccaccgcaccggccaagtttccccttttcatgagaacaccagtcagattagattaggcccaccctagcggcttcattttaactggattgcctcttcagagcccctacctccaaataaagtcacatcctgaggtactgggggttaggactccagcatatatatttttttggggagacacaatttaatccataccaacattcaggatgtatgaggggtgttagagaaaagatcaagatacccagactggctgtagtagagagtgcatgaagtgagcaatgtactagaatgccagactgggaagatggagacacagtgtgaggcctgggagtgcaggctggggaatgccgtatgaactaggttgacagaacatgttttaatgaaatatgtgtgaggccctatgataggggaggcattggtgagtggacatagaaagactcatcctcaaggagctgacttttttttttccttgagacagggtcttgcttcgttgtccaggctggggtgcagtggcgctatgcccgctcactgcaacctctgcctcctgggttcaagtgattctcctgcctcagcctcccaggtagctgggattacaggtgtgcaccaccacgcctggctaatttttgcattttcagtagagatgaggtttcaccatgttggtcaggctggtctcaaactcctgacctcaaatgatccgcctgggctgggtgcggtggctcacgcctgtaatcccagcactttggaaggccaaggcgggacggatcatgaggtcaggagatcgagagcatcttggctaacacggtgaaaccccgtctctactaaaaatacaaacaattaaccggtcatggtggtgattgcctgtaatctcagctgaggcaggagaatcacttgaacctgggaggcggaggttgcagtgagctgagatcctgccactgcactccagcctgagcaacagagcaagactttgtctcaaaaaaaaaaaaaaaaaaaaaaatccgcccacctcagcctcccaaagtgctgggattataggcgtgagccaccgcacccgatggagctgacattcttatggggaatttagacactgtgaagattgagctcacaaataaatgtgtgattacaacagttaggtgttgaagggcaaggaaatgagtctttgtttttattggggatcacgaccaaggctctgagacagtgatgctttgatcatgatgtgaaggctgagtgggagttactaggggagaggagcattcggggcagaggaccagcttgtgcaaaggccctggggtggcagaagggagcattgcccctttggggaacagggagatgccagtgtggctagagatcagagggcaagggggacataggtgagccgaacctcactagccatggtaaggacccatcctgggagccatgagaagcctttgaaagttttcagcaaggagtgaaggggtcagatttacctctcagactactggggaactactgaagtgtctgagttaaagagtgacagccatgaagctagtttttttttttttttttgctttttttttttgagacggagtctcactctatcgcccaggctggagtgcagtgacgcgatctcggctcactgcaacctccgcctaccaggttcaagcaattctcctgcctcagcctcctgagtagctgggattacaggagtgtaccaccatgcccggctaatttttgtatttttagtagagacggggtttcaccatgttggccaggctggtcttgaacttatgacctcaaatgatccatgcgcctcggcctccgaaagtgctgggattacaggtttgacccaccgcacccggctcgaagctagtatttttgagaggttcttgcgtgttgttctagggcagaggtgcttaccctggggtccatggactcaaaggtagatttcacagggttcatgaacctgaatggattcaattattttaattagcttctagctaaaattcacttatgaattccgcccattatgaattaaggcaacaaagcacagtggtaattgtagtacacggctttgtcctcagcggaaatcatagatattctcagattatattacagtagctgcagatgttgtgaaatgttgtctgggctcatcattgctttgaaactgtggagttattttaccctattatttaatgagtttacaaagaatcacatgttactgtatctttttttttttttttgagatggagtttcgctcctgttgcccaggctggagtgcaatggcacgatctcggctcactgcaacctccgcctcccgggttcaagtgattctcctgcctcagcctccccagtagctgggattacaggcgcctgccacgacacccagctaatttttgtatttttagtagagacggtgtttcaccacgttggccaggctggtcttgaacccctgaccttatgtgattcacccacctcggcctcccaaagtgttggggttacaggcgtgagccaccgcacccggcctgttactatatgttattttgtttaatgctttgataaccatattccaaggtagttggattcctctgcattcctgcatattttattcatgaattcatgattctgtgcagtgtccacaggcttccttagaatgattaggggcacaagaaatattgggaaccccctggtctattttcattgtaactggcagaagggctcaaataagacaaaagagaaataattggctccctaacagagaagtccatggacaccctacattcagatgtttgaacgatgtcctcaggagcccatttctctccaactctggcttctgctggcttctgagtcacctccttcttaggcaagtcctgcccacaccatgcccacgctcaggctgtgatgacctgggcagctctgggcttaactagccctttcagccaggaatccagtagataaacggaggacatctttctggattgcttttgtgaaactctcagagatgaggcttattggctggcatgcctgggtcatgtgcccatactaaactaatcacagtggtgaggaacatggagtactctgattggcctgcttgggtcatgtggcaatcctgagccaattatattgatgggaagaagtattctgattggcctgcttgggtcatgtgctcatcctggaagcaaggtaggcagcgattgctgggtgacttgtttatctcgaaatcaggctggattagggtcttagtggcaggagtgtccaatctttcggcttccctgggccacattggaagaagaagtgttagtgtggaagaagtgaatttagtctaacactaaggatagtgttttagcttatagctgatgagctaaaaaaaaaaaaaaaaaaatcacacacacgcaaatctcataatgttttaagaaagtttatgagtttgcgttgggcctcattcagagctgtcctgggccgaatgcggctagtcgtgggttggacaagcttggtctagactttcatggtctaaagttatggctctcctaattcctgcagtgagataagacccctgcagagaatgatgacaaccggtgctcatatagtgcttgttgggtgccagggactgctgtagtactttatacatatttatcttcacagtccattcagtcctttcaagaacactaggaggtgggtcctattactaacttaatagtgctaaatatatacacgtactatgtaccctcacacacacacacacacaaatagtgctgacaaggtcattatcacgcaattggcaaatggcagccctagaatcccaggcccagctcttctctataactatgttgcttttccttgcctgctaggggaccttaggcgagggttgcccctcctgggtgtcagtgcttccatccataacacaagaattggactgacagttttcgggggttggaggtggagctgggaggggcgtcagggatgagaggtgtggggcattgggtcataaggcctttgctaagtcagcctggcttggagcttctctgtttcttttcccagggctgttcccgacacagcagtgcccacagaggcctactgactgcaggaagcagtgtgagcctgactactacctggatgaggccgaccgctgtacagcctgcgtgacttgttctcgaggtaagggccttgttctctctccagggcctccttctagggagcatgaggggtcctcagaggagaggtgaagaatctggaaggtggagagcatcatgatttgatgtctgttctctgaattgtcctcctggtgcctcagtttacctctctgcatttgtgatttgatatcagccatgaccttttgcatccatactttcacagagacttaacatgtttcctgaaggagaggactcacatttttttgagtttaatcctcaccacagccctaggggaggatttcttgcttatccttactttacaatgaggaatttgaggatagggaggttaagggcctttccaaagttacaaaactctggtaagtggcagaactggagtttgagttgtggcctgacaccaagagctgtgttcttttcctaagatcacaggacttccaggaaaactgtttcagtatgaccttttattgttagtctcttattatggttagagaatgcagtctgtgtgctatctagtgtttatttttgtgtggatttttttggggggtagggtgggggaaatttgttgagatctttttgtggtctaataaataataaatgatcatgtattttcagagtgttcagtgtatgggtgttttaaaatgtgtattctgtttgttgcgtataaagttctctacatatctattaagttaagcttgttaattgtgttatttaaataatgtgtacccttatttacttttatcacctttatttctgagagatgtgttaaaatcttatctcccagtatacttgttcatctattagattttcattgtgttctttctatttttgcttcatatatgtcaaagctatgttattaggtacataaatgttcatgaatgttatgtttttttggtgggttgggctttttatccacatgaatatacctctccattccttgtaatgccttttcccttaatttcacatttgtttggcattaatattgctattccttcctggaagaagtagcaaaggttaaaaagaaagaaaagtaataataatactgccatttcttctttctttttattagcatttatctggtgtatctttgaatttctaaaagtaatgactgcattttatgaaatgaaaattataaacatttattatttaaaattcaagcaatacaaagagtgtaaggaagaaaacaaacattgccctccccagccctccatctatagataactactattatcattagatggctgacacgcctctacctctctgtataaagatgggtaggttagtaaccagacagcctgtacacacttacaaagaaggaattttaagagaatggcaacatatttatggcattaaaatgataatatttaattttagtcaaaagtatcagaaaaagaaagcgaagtgaaacagaagaatgccaaacctcagtcagattaatgtatcttcagcaaaagatactgcaattcctttaaaaaaaaaaaccctctaaaattaagaaaggaggttatgaaaatcagtaagtggttaataatcatttcagaatctactatctcttgcagtaaaggcaaaatctgcttagtttgagttttggacagtagagaatagattgactccctgtaatgaagaacaaagtaattatttttcccacctcctcatcctcttcctgacttttattccttacacaaattttactttgtcataatctataatgtttatattctcatctgcaaccataagtcccttggcatgttagccttaacattttttattattcatgatgagtttatttggcacagcttctctgttcctgagtttttcactttgattcatcatttgagtgattggattacactgtcaggtggatttttcaagaagggctcgtctttgcaatattctctgttatttcatgtttgaggatgcttgtctgttgcctatatttttgttttcttttttttctttttgagacagagtctgactctgtcgcccaggctggagtgcagtggtgcaatctcggctcactacaacctctacctcctggattcgagcgattctcctgcctcctgagtagctgagattacagggatgcaccaccacgcctggctaatttttgtatttttagaagagatggggtttcatcatgttgcccaggctggtctcaaactcctgacctcaagtgatccagccgccttggcctcctaaagtgttgggattacaggtgtgagtcaccattcccggcccaatttcttatctttaaattttaagacagggtctcactttgttgtccaggctggccttaaactccagggcttaagtgttcctcctgcctcagcctcccgagtagctggggctgcacttgcatgttactgcacccaacttacaatttttttgtgtgtctctgaggatataaattatagtcatgtattgcttattgacaggaatacattctgacaaacgtgtcattaggcaattttgtcgttgtgcaagcatcctagattagtgtacttacacacacctacatgatgtagcctactgcacacctaggttctatggcagatccttttgctcctaagctacaactctgcacagcatgtgactgtcctgaatactgtaggcagctgtgacacaatgtgagtatttgtgtatctaaacatagaaaaggtgcaataaaaatacgacataggccgggcacagtgactcacacctgtaatgccagcactttgggaggccgaggagggtggattacctgaggtcaggagttcgagaccagcctggctaacatggcgaaaccccatctctactaaaaatacaaaaattagctgggcgtggtggcacgtgtctgtagtcccagctactcaagaggctgaagcagaagaattgcttgaacctgggaggcggaggttgcagtgcgccgagatcatgccactgcactccagcctgggtgatagagtgagacaccatctaaaaaaaaaatatgatatgaaagataaaaaaaatggcacacttgtacagggcacttaccgtgaatggagcttgcaggacacgaagttgttctgggtgagtcaatgagtaagtggtgggtgagtgcgaaggcctggggcattactatgcactactgtggactttatcaacactgtacacttaggctatactaaatttataagacacatttttctttcttcaataataaattaaacaactttttcactttataaactttaactttttaaacttttggctcttttgtaataacacttagcttaaagcacaaacacatcgtacagctgtacaaaaatattttctttatagccttattcattacacttttttctactttaaaattttattattttattatttttaacatttttaaattaaaagctgagacgcaaacacctacattatccgaggcctacacagagtcaggatcatcagaatcaccgtcttcctcctccaaatcttgtcccattggcagcgtgcagtgactcacacctgtaatcccagcactttgggaagccgaggtgggcagatcacttgaggtcaagagttcaagaccagcttggccaacatggtgaaaccccatctctactaaaaatataaaaattagccgggcacgttggcatgcgcctgtaatcccagctactcaggtggctgaggcaggagaattgcttgaacccgggaggcggaggttgcagtgagctgagattgtgctactgcactccagcctgggtgacagaatgagactctgtctcaaaaaaaaaaaaaaaagaatcctgtcccattggaaggtcttcaggagcggtaaggtaacatgcatggagtatcgtctcctatgataacaatgccttcttctggatacctgcagaaggacctacctgaggctgtattacagttaacttttgttttaataagtaggagtacactctaaaataatgataaggccggcttggtggctgatgcctgcagtctcagcacttagggaggccaggctgggagaatcacttgaggccaggagtttgagaccagcctgggcaacacagtgagatccccatctctacacaagataaaatacattagctgggtgtggtggcatgcgcctgtagtcccagctactcaggaggctgaggtgggaggatggcttgagcccaggaagttgaggttacagtgagctgtgatcatgccactgcactccagcctgggcaacagagcaagaccctgtttcaaaaaaaaaaaatgataaaaagtatagtacagtaagtacgtaaaccagcaatatagctttctatgatcattatcaagtattacatactatccataattgcatgtgctatgcagcacttttatacaactggcagggcagtaggtttgtttataccaacatctccacaaacatgggagtaacgcacgtgctacgacattgccgtggctatgacatcactaggcaataggaatttttcagctccattataatctcttttattgttttttttgtttgagatggagtcctgctctgttgcccaggctggagtgcaatggcgcaatctcggctcactgcaacctgggttcaagcgattctcctgtcttagcctctcaagtagctgggattacaggcatgcgccaccatgcctggctaatttttgtattttttttaggagaggcgggatttcaccatgttggccaggctggttttgaactcctgacctcaggttatccgccctcctcggcctcccaaagtgctgggattacaggcgtgagccaccgcgcccggcttccattatgatcttgtgggaccatcatcatgtacgccatccattgttgactgaaatgttgctctgtggtgcgtgaaggtatcatttctaatgttttgttctgttttccctcttttctgcctccttgagtgttagtgctctttgcattcagagctcctcttccttggcgctggttttcctctgatgtttggcgacttctagttctgtgcacatcatatctcatgatgccggtggtctgcgaatggggcttctgaaacccacctctgagggcaatggggctcaggtggggctgcaacagtctctttgcgggaagacgcgtggcctctggctctgtggcatgagtgatgaggagctatccagagcctttcccccttcttcagagagtcccccttggctgcattctgggctgtggtctccttcactctgatcttatctgtcctctgccttccgtatttcggggagttgtcttcgtttctgatctgccaagcttgccccttcttggtctccaggcctgttacacattaattattagttttaccagtgctatttttgttttgttttgttttgtttgagacggagtctcgctcttttgcccaggctggagtgaagtggggccatctcaactcactgcaacctccacttctcgggttcaagtgattttcctgtctcagcctccccagtagcttggattacaggtgtgcaccaccacacctggctaatttttgtatttttagtagagacagggtttcactatgttggccgggctggtctcaaactcctgacctcaggtgatctgcccacctcggcctcccaaagtgctgggattacaagtgtgaaccaccactccccgcctagctgtactttttatgtctgttaaccaacctgtgatttcctgcttttcctgccagcagttgttattatctgtctttttgattcgagtcattctagtggttgtgaagtggtatctcactgtgattttgacttgcatttccctaatggctaacggtgtgggacatttttcatgtgtttattggccagctgtgtatcttctttagagaaatgtctattccagtcctttgtccattaaaaaaattaataaactatttctggctgggtgcagtggctcacgcctgtaatctcagcactttgggaggccgaggcgggtggatcacctgaggtcaggagtttgagaccatcctggccaacgtggtgaaaccccgtctctataaaaatacaaaaaattagttgggcgtggtggtgtgtgcctgtaatcccagctactcaggaggctgaggcaggagaatcacttgaacccaggttgcagtgagccgagattgcgccattgcactccaacctgggtgacagagtgagactctgtcttaaaaaaaaaaaaattaataaactatttcttagagcagttttaggtttacaggaaaattgaacagaaaatacagagttcctatataccctcaacccccttcccaatctcccacagtttcccctattttttgtttgaaacagggtatcactcttttgcccaggctggagtgcagtggtgcaatcacagctcactacagcctcaacctcctgggctcaagcgatcctcccgcctcagcctcccaagtagctgggactacaggcatgtgctaccatgcctggctaatttttgtattttttttttgtagagatgggatttcaccatgttgcccatgttttatagagatgggatttcactatgtcgccatatgagggcaaatgatcctcctgcctcggcctcccaaagtgctgggattaaaggcgtgagccactgcacccagcctcccctgtcacgaacaccttgcattagtgtggcacaattgttagcattgatgacctgataatgatgcattattattactaactgaagtccatagtttacagcagggttcactctttgtgttgcccattctagggctttagacaaacggatgatgaccacgtgcccaccatcaccgtggcatccagaatattttcactgccctaaatgtgtcctgagctcgtcggttcacctctccctccccctgaacctctggcagctactgatctttttactgtctcgatagtttcatcttttccagaaatgtcatgtagttggaatgacagtgtgtggccttttcagactggtgtctttcatttagcaatatgtatctaagtttcctccatgtcttttttttatttttttgcattttaaaaaattggtacattaatttaatttttaatccaattttagtggtcaccagggggttgagctgggaggcggaggctgcgttgcggactgcacctgccctctccccctcatctcaagagctatctggagagacgccttccttctgttcccctctgtgacccctgtctgtgtcccttagacgacctcgtggagaagacgccgtgtgcatggaactcctcccgtgtctgcgaatgtcgacccggcatgttctgttccacgtctgccgtcaactcctgtgcccgctgcttcttccattctgtctgtccggcagggatgattgtcaagttcccaggtcagtgtccccacccttaactcaggacagagatctatgctgttgctgctgcaccttccgcccaccccagtgcactgttgacttccgacctcccgcttcccggagactgttggacagatcatgtctcctttggcgatgggccagggatgtacccagcacccagcccttctgctgccctcccccaccttgtgttccaggtgcagagagaccctgctgtcccctggcatagacctggctggaggaggtcttgctttggtttgaggctcaaggcagaagttatctgatgccccataaacaagaagggaacctcaagtctctgtcctgggagtttcctagaagattggggttggcttccccctttcaggttcagggcattgggagttagaggtgctgagagatctggccccaggctcaagacttgagaaacttgggtttcttttccaacttaccgtgtgacctcagacaagtttcttacctctctgacttctacttctctgatagtacaaggtgtcagggctgcttttaaccagagaaggggtatgggccacagaacctgtctgggtggagttgggaccatcttccagaagggaggcatgaggagtgggtgggctttggagcacagcacagagtggctgccgcagttgcagactgtatggagccggggagatgggctcagaggcagccctgtgtccactgtccactgaggagaaaagtgccacaaagtgcctgtggtccctcccccaaccaggtccttctctggagtcccatgccctgttgtgcaaacctggggattggcagtcacccccatcgctaccactgcctgccccttttatccttccctcgttccctcatccttcacagccagcccatcctcgagtcctgtagatttggcctccaattatcttccccaccttctcaccccgaataccttctcttatacagcccccatggcagacagccagaatgacccttgcaagaccaaatctgaatctgatcctctctctctctctctctctactcactcactctctctctgtctcacacacacacacacacacacacacacacggatatatacctgaaatgcttcagtatcttcctgttactctaaagataaggacacaaggccaggtgtggtggcttacgcctgtaatcccagcactttgggaggccaaggcaggcagatcacttgaggtcaggagttcaagaccagcctggccaacatggtgaaacctcatctctactaaaaatacaaaaattagccagccctggcagcaggtgccctgtaattccatttactcaggaggctgaggcaggagaaccacttgaacctgggaggcggtggttgcagtgagctgagattgagccattgcactccagcctgggtgacaagagcaagactccgtctcaaaaaaaaaaaaaaaaaaagaaaactccagggactcaccacggtgtccttcaggtcccaaggcccccagttgacctgccttcttctcttcatgtttcagagccttcttacatttattttgtacataatgtccagggcttttagcggttcttggcgggaggatgaggggaaaacgtgtctaagccatcttcccagaatcagagtctcaggatgtgatcccaacacagccccctcctttctcccagcttcagctctcagcaccaagccctcactctctgggctccacctgcgctgcccttcttccaggttggaggacgtgtgtgcttctctgtcccacccgccctctgcacgtgctgttctctctgtcggagacacccttccctccccattcacttagtcaaatcctactcagccctgagctctccaccccacttcctcaagaggccttccctggcctctcactagggaagctggtagcactgtgtcctttgcaaatgtggatacatacctctctctgtctcttggcttgatcaatgtctgtctccctccctggctggaagcttcctgagggcaaagaccatgcccctggtgtccatcaacatctccccactgcctgatcaaatgctaggcatggcacctgctccccatagagattcattgaattaagatatggggacacctgacagggagctccgagctggtgggggggtggagttcaaatctggtcaaattccagggtcgggggagagcgctctgctaaggaatgatggaggcctccacccataagcaggggagagtgctggagtggactgggcagcagatacctaggattttgcaaagatttgcaactgtggggcatgttcccacccgcctctggacctcggtctccccatctctcaaatgaggaggtataactgaaggccttgggggcctctccaaaaaggccaaacttcccaaaagtttccagctcagaaacttctgcatctttgtgaaaaacatcttgagttcagttgttccagccaaggcttcctgctggagggactgtctgggcagtgttcctgagactgccacacagcggcgccagaggcctccctttgctgcccctggaccccagctgcccaatgcagtgcccctggcccgtggcacgtggccacgcacttaaaatgcagctaggggccgggtgcggtggctcacacctgtaattccagcattttgggaggctgaggcaggcggatcacttgaagtcaggagtttgagaccagcctggccaatgtggtgaaacctcgtctctactaaaaatacaaaagttggccaggtgtggtggcgggtgcttgaaatctcaactacttgggaggctgaggcatgagaattgcttgaatccgggaggtggaggttgcagtgagctgagattgtgccactgcactccaacctgggcaacagagttagactctgtttcaaaaaaaaaatccgataaaaaataaaaaaaatgcagatacgtctgcattgagaagtgctgtgtgtacaatatgcactggatttcgaaaacttagtataaacaagaatataattaattattttttatattgattgcctgcaaacatggtaatattttagatatactgggttaaataaatatactatgaaaattaattgcactgatttctttttaccttttaaagtgtggctcccagaatatttgagctggcctgtgtgactcgcatatctctgttggacagcactgttttagaagtgttctaatctcagctgccaaaccctggttaatctctggggtcccctgtggactcacccatggggcagctctccggggttgttgttttttttccagctgtaaaatagaaagcagtttctgcctccagtcagccaagccccacgctaagagccttcactggctgtctctcctgaaattctcacgtctccataagacagacagtattagccccattttccaggtgtggaaatcgaggtccggagatgggaggtaaattgcccgcggagacagagcaggaaatgtctaagcttaggtgtcatcactccaccatgccacagaacacgagaggtcagcattgctcgcgctcacctccacggaaagcttcagagcgaagtcccacacatacaggccaccatttttttattttttttttttttgtgatggagcctcgatctgtcacccagactagagtgcaatggtgtgatctcagctcactgcaacctctgcctcccggattcaagtgattctcctgcctcagcctcctgagtagctgggattacaggtacctgccaccatgcccggctaattttttgtaattttagtagagatggggtttcactatgttgtccaggctggtctcgaactcctgacctcatgatccgcccacctcggcctcccaaagtgttgggattacaggtgtgagccaccgtgcctggcgacatacgggtcaccttctaagtgatgggatgggagtccagatgggtgtaaggacatagcatttaccatatgtcatgcaatgtgatgggcacctcacgtgcactcttctgtttatcctgacgacagcctggtgaagagtgtatgattataatcatttgactgggctgggcacggcagcttatgcctgaaatcccagcactttgggaggctgaggagggtggatcacctgaggtcaggagttcgagaccagcctggccaacatggcgaaaccctgtctctactaaaaattagccgggcgtggttgcaggcacctgtaatcccagctactcaggaggctgaggcaggagaattgcttgaacctgggaggcagaggttgcagtgagctgagattgcatcactgcactccagcctgggcgacagagtaagactctgtctcaaataaataaataaacaagtaaataaaatggactttcctggcacagttaggacatagcaggcaaactgaggggcactggctagacgatgtgtgtgttttcttctccactctgcttctgtccagcattcttcaggactccttggattgcatgtagcaaaatccccaattttttagcacatgtagcttaaaagtctggggatagctctgagaagcttcaggcatggctggatccagggctccatcttgccccatctctcacctctatttccctctctgttggttcatcggcaagatacttacaagcagctctgcccagcgccagtgggaagacagcttccctttcttacatttttaatatccaaaaccaaaacctttaaatcccaaaccagaatctttaaattctacctcacaggcttgggtcacatgtccgtccctgaactggctcatcgtggccagaggaatgcaacggattgattggtccagcctggtctcatggccactcgggaaagggggttcagtcggtcccaacctctaaccacagatgctgagatcagagggagagtaattccccagggaaagataggctgctttactctgaaggggaacgggtgccaggcgggtgccacctccagatgactgctgtgttttccaagggccccatctccgactctggcctgtggtagtgaagggtgtattccgggagactttgggtccccaacactgattctgaaggcactgctgtcccccctgcaggcacggcgcagaagaacacggtctgtgagccggcttccccaggggtcagccctgcctgtgccagcccagagaactgcaaggaaccctccaggtgactccctggctttgcctcctcctcttcccccaagctggctttcagatgaggctgccccaccccacaggacgcccatggtacaactgggctgggggtgtaagcgggattcagcccatggtgtcagcactttggggtgcctctctgccaagcccctcagatcatttgaggccctagggtgtgcccagccctgccctgagcacatgggagacccacagggcttagaaaacacaggccttgctcccaggagcttacagtgggcccgccagaggcagtgggccaagggcctgggaccccatctctgtggaaactgttactcgtgagcacaggcctcccttgccccattggcagaattatcagtcccatctctggcttcttccccagtggcaccatcccccaggccaagcccaccccggtgtccccagcaacctccagtgccagcaccatgcctgtaagagggggcacccgcctcgcccaggaagctgcttctaaactgacgagggctcccgactctccctcctctgtgggaaggcctagttcagatccaggtaatttccccatgaagctgtgggtcgtctccctggggtgctcgattggtggatggcccatgagtgggggtgtttggagcaggcgggcagtgatctgtggtcttttcctggtggggagagaagacggtggtaaggtatgatctagggctgaaagcattgaggggcagaggtagacaccagagggctcattcatttgccagcagtgcagagggcctgccttgtgccggacacccgtgccccatctctccctctatttccctctacgttggtttgtcagagggaaatgggtcccactctgctgttgtgacacttgcgactcagctggccagcctctgcacgtgtccatctgatgccctcctggtctccatggcgaagggtcgaccctcagtcatttttctttttcttttttttgagacggagtttcgctcatgttgcccaggctggagtgcagtggcgcaatctcggctcactgccacctccacctcctgggttcaagcgattctcctgcctcagcctcctgagtagctgggattacaggtgcccaccaccacgcctggctaactttgtatttttagtagagatgggatttcaccatgttggtcaggctggtctcgaactcccgacctcaggtgatccgcccacctcggcctcccaaagtgctgggaggattacaggcgtgagccaccgcgcccaacctagtcccattttattactgaatagccctccatggcgtagatatgccgagctctgtttatccagtttttgaatatttgggttgtttctgccttttgactataatgaagaaagaaaaatacatctttgcgtgtatgtgctttcctttctcttgggttggttttgtaaaaaaaatggatttgtgggacttctaacaattttgggttggagctcttttcctatagttgtaccttctcccgctccatggctttgcttattctctctatgatgtcttttgtttgtttgtttgtggtttgtttttttgaggtgagtcttgctctgtcgcccagactggagtgcagtggcgtgatctcggctcactgcaacctccgcctcctgggttcaagcaattctcctgcctcagcctcccgagtagctgggattacaggcgcctgccaccacatttggctacttttcttttttttagtagagacggggtttcaccatgttggccaggctggtcacaaactcctggcctcaagtaatccacccgcctcagcctcccaaagtgctgggattacagacgtgagccaccgcgcccggcccacaccagtctttaaaagagggaggcaggaggcacccagcccctccctgcccaataccattctgaacaggagttacgctagtgtgctgagctctcagggaagctgttcccaaagttttgagcaggggagtgacagagccatgagacagggttgggggaagctgtggcatggtggcctcaggaggaacagtgggcaggggctggttggggggcaatgagtaccctcctctcgtgtggaatgcacgcagcattcctgtcctctctgagcctcaggactccctctgaaaggctggactgagctgacatgcggagtttgggagctggccacggtgagggatggggggcttcagggttgggtggggagtgaggcctttgccaaggcggcctggcctgcagcttctctgcttctttccccaggtctgtccccaacacagccatgcccagaggggtctggtgattgcagaaagcagtgtgagcccgactactacctggacgaggccggccgctgcacggcctgcgtgagctgttctcgaggtaagggcctcgtccctccccgggcctcagtttacctctctgcatttttgaaccgtgaacttccagtaactactcccccttatgtttgtgggtttttgatgggggtcgcctcttttcagagggcttccattggcatattatttccttccaggaagcgtttgtgaatcacccacctgttccaaactcggctcatcaatgtttgtaactactctgtgattcaagcattgtgatcattccccttttacagaggaggaaacggaggctttgggaagtcagggaacttccaagggctgtgggctggagtttgaacccagacaggtgccaccaggttccaggttctcgtccactccactcgctgcccctatgagccacttattctttttttttttttcccagacagggtctcactccttcacccaagctgcagtacggtggtgggatcatagctccctgcagctgtgacctcccaggatcacatgatccttttgcctcagcctttcaagtggctgggactataggtgcacactaccatgcctggctaattaaaaaaaattttttttcatacagatgggggtctcactatgttgcccaggctgctctcgaactcctggactcaaatggtcctcccaccttggcttcctaaattgctgggattataggcatgagccaccatgcccggcctgcgagctgttttgacaagcacttactgagtgcacagacacagcacgatgcaggtgtggggcttccctgtgcccagcccatcacaacctcccagcgccagcagcaccccgaggggcatgtgggcagggggtgttgctcaggccacaggctgctgtgactgttagaggccctggctattcacggaggccactgggaatgtgtgtctgtctccttgtccagagctgcttttgggcagcaaagcagagtgaagggtcaggggaggccaaaaagaaccacagacactgtttgttgtcattggaggtctctgtcctagttactaaggctgcatagcaaattttcttaaaacttaattgtgaaaacaaatcattctttgtactcacagattctgtgagtcagaattcagacagggcactgcggggacagcttgtctctgctccacaatgtctgaggtcttagctggaaagcccaaaagctgcagatcaggaacttctgaagcttcattcattcacctgccttggggttgatgttggctcctggctgcagccttggttcccttccatgtcggcctcttcgtgtcttacctggggcttcctcatggtctggtggttaggttctaaaggcgaagtctttttctctttttttctttttttgtatttttagtagagacggggtttcaccatgttggccaggctggtcccaaactcctggcctcaagtgatccgccggccttggcctcccaaagtgttggaattacaagcatgagccattgcccccggccataaaagtcttgagagagagagacagacagaaagagagagtgagagagagacagaaagagggagagaaagagtgagagagagaaagagagagacagagagaaagagacagaatgagagggagagagacagagtgagagagagacagaaagagggagagagagagacagaaagagaaagagacggagtgagcgagagagagagagacagaaagacagaaagagagactgagagacagagagagacagagatagagtgtgacagagagaaagacagagaaagagagagagagagacagaaagagagagagagagacagacagaggcagcagccacccctccttttatgacctggccttggaagtcacacagaacttctaccactttctgtttgttgaggcaaccacaaatgtcacttgagaccaagggaaggaaaacagttgtacttcttgacaggtaggtggcaaaggctctggaagggccagaacatcactgcagccatgttttggggaaatacagtctgccacaaccaccatgtggacatatggagaaagaggtgttggctctgggcccagtaattccttcagctctcctaactgaaaccccacgaggcagtggagtggtgtattagtagctaaaggcatgagctctagaacccgagtgccgggttcagatcccgcctctcccacttgatagcctataacctcaagcaggtttcctaacctctctgtgcctcagtttcctctgctgcaaaatgggcatagtattatctatctcagagaaccatgtgagaattgaatacatgattgtaggttaatctgggtagagtgctgagactactgtctcacacatactcagttatcttaagagctataataataatgataatagctgccattgtcccaaatggtttcattcattgctgagctcacacacaccctttgcacaaattccccaaatcctgcccagttcccttgctctggatgttgtaagaagagactgtccagcccttatcattatcatgctgggtctctaagtatcctgctgattgagatctaccctcgcggagaggtcccatttgcctaatctactgatgcagtcgttctgtatttacctctaagtggagcgttgcaaaatattcccgaatacgtacaaatgcattattacacttattaaaaataatacctctaacatggtttttttttgcttttggaggaaaaaaaatctttttttttttttttttttttttttttttaaatagacagagtcttgttctgtcgcccaggctggagtgcagtggcactatcttggctcactgcaacctctgcctcccaggttcaagtgattctcctgcctcagcctcctgagtagctgggattacaggcacgtgccaccaggcatggctaatttttgtatttttagtagagacggggtttcaccatgttggtcaggctggacttgaactcctgaccttgtgatctgcctgcctcggcctcccaaagtgccgggattacagtcgtgagccaccgtgtctggccaaaaaatctttttattattaaaaatttcaaacatattcagatgtagagtgagtcagagatggctgcgtactatcacccagctttaaacggttatggagtcatggccagtcttggctcctctgcacccatgcccgctcaccccgtcccctggaggactttcttttaacagctttagggagagatagtgggcatatggtaaagtgcatagattaaaggatgcaatctgataagttttaacaaatgcatgcagctgagcaaccagccatccccctctaaaagttacctcgggttgcttgtcaccatttcccatcccctgcttatggtcaccatgcaatagcttgcatgtaaatgcgacatacagaataccctcgctttttgcctgccttctttcaccctgcagaattattttgagcatgctgggagagctgctcaacggcatagtcagacgagcatttattttcttgttggatgacccttggacaactgcttctctgtcttcctgggggctctctggaccccctgcccttgccatactgatctttctccgtgatcctcatctgtgtcccttagatgaccttgtggagaagacgccatgtgcatggaactcctcccgcacctgcgaatgtcgacctggcatgatctgtgccacatcagccaccaactcctgtgcccgctgtgtcccctacccaatctgtgcagcagagacggtcaccaagccccagggtaagcagttcccaccccaggcctcgaccacggggtggagtctgtgcccccactgttgtgcctctccccaccaacagccaggggtggaggcaaatgacctacaccctcggctgttcattaggtcaggtttgggttctggttatcctttgagtagtcagactcagtgaatggaatgataaaatccagttttagcattttggcaagagattctgttgattaaaaaaaaattcttcctgaaattattgggctggtaaaatctttatatttttgagatggagtttcgctcatgttgcccaggctggagtacaatggctcaatctcggctcaccgcaacctgcacctcctgggttcaagcaattctcctgcctcagccttctgagtagctggggttacaagcattcgccaccacagccggctaatgttgtatttttagaagagatgcggtttctccatgttggtcaggctggtctcgaactcccgacctcaggtgatccacccaccttggcctctcaaagtgctgggattacaggcctgagccaccatgcccagccccgggctggtaaaatcttgacctgtttgcaaggctgttttattgacttagagagatgaatatcaagtttctgaagagatttctaacaggacggttggctttaccagtgtgcaggaaactaaaaccctgacagttttttgttgttgttgttttttgttttttaagggctttgagagattttaacaaatctccaggtggtttaaaacagatggaagagtggtgacaaaaccaaggggaatggccaggcgtggtggctcacgcctgtgatcccagcactttgggaggctgaggcaggtggatcaccttgaggtcaggagttcaagaccagcctgaccaacatggcaaaaccccgtctctactaaaaatacacaaattagctgggtgtggtggtgggcaccgtagtcccagctactcaggaggttgaggcaggagaatcgcttgaacccgggaggcataggttgcagtgagccgagattgcaccactgaactccagcctgggcaacagggcgaaactctgcctaaaaaagaaaaaaaaccaagtggagggaaggtcacccaatgtgactctgtgagggctgccagagaagtgaggggtgacttgcttctaggacccccagagaggctctgggcttggaagaggcaggcagatgaagagcgggagggaagttgagaggtgtgaggtgtagtggcctgggactactaaatcttcaaacacaacttcaaaatgtattacaatggcatggcatggccactgaccagtttgcacagatgatgcctgagtttttaatccccagtattgtctttttttttcctctttttttagagatggagtctcgctgtcttgcccaggccgatgtgcagtggtgtaatctcagctcactgcaacctccgtctcccgggttcaggcaattctcctgcctcagcctcccgagtagctgggattacaggtgcccgccaccacacccagctaattttcatatttttagtagagacggggttttgccatgttggccaggctggtctggaactcctgacctcaagtgatctgcccgcctccacctcccaaagtgctgggattacaggtgtgagccaccgtgcctggccaacaattgtcttcttgagtcagaacattgaaggaatatccggggaaagttcgggccactagtggggtgctgtcactctgtttgtaaagccctctttacttgggtatttggaagtgcacctgtcaacaggctagccacaccccatcaccctgaaatggaggctgccagctcacactctccgcccatgggcccagggttccctggccaacttcctactcagggaagagacccattgtgaacaggacatactaacacagcagaagaaactgtccccgctcagtgactggaatattcagtagagtccttaggattttattttgtttgcataaatgtatggggtacaagtgtaattttattacatgcttagattgggtggtgaactcaggacgtttagggtatccctcacccaaatagcatacattgtaccccttaaataatttctcatggtccacctacctatacctcccaccccctcacccttctaagtctctgttgccttttattccactctccagctccgtgtggacacagtatttcactcccacttagaagtgagaacaggcagtatttgtctttctgtgtctgaatgtctgcacttaagaatatggccttcagttccatccatgttgctgcgaaagacttgatttctttccttatgatggctgagtagtattccattgtgtatagatgccacatttatctattggtggatgcagcataaccctccccccccacccttttctttttgagacaaagtctcgctctgttgcccaggctggagtgcagtggtatggtctcggctcacggcaacctctgcctcctgggtttgagctattcttgtgcctcagcctcccaagtagctgggattacaggcgtgcaccaccacacccggctaatttttgtatttttagtagagacggggtttcaccacattggtcaggctggtctcgaactcctgaccccaggtgatctgcctgcctcagcctcccaaagtgctgggattacaggcgtgagccaccgcacccggccaagcataacccttttaaaataaatatgaatgagcaaagatttgtaagaaaaaccagccctacaaaggagaataaaaagatacgaaaccagaaattcttaccacacatgaagctttgataaatccaggaatagaagagtacttagcaacattaaattcgtgtctgcagaaaaattcacgaagtcgttacatccataaggtgggcacagaatgctatgaaaaggaacaatatgggatcagagggcaagaaaaggctttttagaaagtgtgcttgtgatcagcccatcatctctaggttctccattcacctttccatccctgccctgccatcaacgatggctccgcctttctcctctgtagggagcatgcagttaagccttgccagcagagggcgctagagggccatcgcaggaggaaggaggcttctggttgcatttgtttttttgtttgtttgtttgtttcttttctttttttgagacagagtctcactctgtcgcccaggctggagtgcagtgacgcgatcttggcccaccacaacctccacctcccgggttcaagcagttttcctgcctcagcctcctgagtagctgggattacaggcacgcgccaccacgcctggctaatttttgtatttttagtagagacagggtttcaccatgatggtcaggctggtctcgaactcctgacctggtgatccgcctgcctcggcctcgcaaaagtgctgggattaccggcgtgagccactgcgcccggccatttgtttcttcttgctcctgctgcctggcctggtgaccaccttgatgtggctctcccaatgcagacattggcacgtgccaggcctcatgtctgcaaaagtgtcctgactccctgattccctctgtgcatcccccaccagccacaggtctttggcaccccaaagtgctccaggcgtctcccccacagtggcagcctcaatttctctgtgcacctgaccagaagcatagacttcaggtcaaaaggacctaccaagagcaaagcaggattaatggaaattacccacgctacatgtaatagatgcaccaccatgattttatctacctgccggttgatggcatttgggttgtttccagtttagggctattatgaatgaaaacagctgtgaatattctttttttttttttaacatgtatgaatttatcttatatcttttattattatttttattatttttagagacagggtctcactctgtgttccaggctggagtgcagtggcatgatcttggctcactgcagcattgaactcctgggctcgggcgatcctcccacctcagcctcccacagtgctgagattactggcatgagccaccatgactggccgattcttgtacaagtctttgggtggatgtatattttcatttttcatgggtaaatacctaggaggagtggctaggtcattgtgctggtcacatagtcagaatgtttttgaggactagtcaaagctggatacctctggtctgatacaaccccttcgttttacacccagagagaagcacagggccgaagctagaaccagaatgcagggatcccaagggtcagcccagagtacttccactggaagacaccacccacccacctccttcttagttctgaacctagaatttacccagctaaattacagtcacttcagctaaattacaatcaagtttgaaggcagcataaaaacattttcagacataaaaggtccagaaggcttttcttcctatatcctctcctaggaagatatttgaagatgtaattcagctaagtgagggggcaaaaaagaaaaacaacaggaagccatggaatctagagaccagcactccatcctagcagagcaaggaagggaagtcccagaatgatgtggtatagaccagttgagccagatcagagcaggaaaatggaaggaaggctccgaggaagtgttcccaggaatagaagagagaattgtagtaaatttcatgattagtagagttgaaaagcctgaggatatggtgagggcacactgtccttttatcaacaagaaaaagaaaggcaattgaaaactcccgggaaaagaaaaagatgacaagaaatatacagtccaaatatgaagatgaaatttcacctgattttaagcgattgctggatgtacaaaaagagaatctgtttggccttgatgctgagacaattctttaaatggcccaaggactgggtgtttggatttaaagagaagtatatccatctggtaaataatattttttttagttcttaaatggaggctgagtaggcaggttcttttcttctcttccagtaggccattaccagagaacacaggcagaccaactaggggctagacaatgccttctcctcaccttcaaatccaaagaggaggaaaaggggaggatcactgactcagggaggaagaaggaaagttacaagttaggtatagtatattcagagaggggatgagaggcacccaagggatactaggttccccccttctgcacatacaggagggacagcagatctgtcgctggatttcagcaggtgtttcagcagcagctgagaccatgggcctgtctagttacatcaggctgccttggagagcaggcagggggctctctcctcatgatgctgactgggaatagccacagttaatgggtttgagcatcagagctccagtccactcaaagtaagtgttcactgaaacccaatgacctttcaaacactgattcaaatactgattaacgagcatgtaggaaccatcataacacatcgcatcatcttccccatagtctccaggctccagctaattcaggtaagagtccagtgaccttccccaaagaggggggttcctcagaaccctacaatgcaagaaataaattaatcctggctttacttttttgtctatttgaggaaaaatctgagaggcgtcacgaacactttgtagaggggagatgtgggtatgtgtgtggggttgctttgtaccacatcaaaaaggggtgcctccaccagggctctgggggtggagaggtgtagtgactgagcataacccacttctaatgtgggccaaattatcctgccccagaaaagcaggaagctttgaagaaggtgcccagtccccaggcaggaggcagtgccatccagaggagagtgctctgggctggaactcgccatctctgtttcctggctgtagctccagccctgcggctctctccatctgtaaaacaaggtagctgggtcagaccagtggtggccagctatgaactggccttcagagacattccgtctggccagcatagcaatccagccacccttcctaggcactcaagaggaatgaaattatacgttcacacagaggcacgcacaagaatactcacagctgccttgttcgtcatagttcaaactggaaacaacccaaatgtccatcaactagcgaacgggtatgtaaacagtggttcatctgtacaacagaacgccatttggcaacagaaaggaatgaagctgaatgaatatcaaaaacattatgcagagtggaagaagccagaccccaaagagtacatactgcatgattctgtcgacatgaaattctggaacagatacactcctctatagtgacataaagcagatcggtggttgcctggatctggaggtgggggcagagtgagtgaggaggggcactagggaaccttctggagggatgagaatgttctgtattttgattggagttagttacctttgtcagaactcatcaggctgtacacacttagggacattttctttttttatttttacttattaaaaatagagacagggtcttgctatgttgcttaggctggtttcgaactcctgagctcaagtgatctgcctgcttcagcctcccaaagtgctgggattacaggcgggagccaccctaccctgccaggggatactttcttgtatataaatgttgccttaggctgggcatggtggctcacgcctacgatcccagcactttgggaggctgaagcaggcagatcacttgaggtcaggagttcgagaccagcctggtcaacatggtgaaaccctgtttctactaaaaatacaaaaattagctgggcatgttggcaggcacctgtaatcccagctactcaggaggctgaggcaggagaatcacttgaatccgggaggcagaagttgcaatgagctgagatcgtgccactgcactccagtctgggcagcagaggaagactcaatctcaaaaaattaaacataaataaataaataattccttaataaagttgatttaaaagaaaaaaactttaaaaattgaggctgtatttaaacattaggcgatttcagttttctcttaaaagcaaaaggtctagcgtcactgtttcaccttcctgggtgaccacagctgttagagacaagtagcaacttctccactttgttttatttattttgagtctttctctgtcgcccaggctggagtgcagtggcatgatctcagctcactgcagcctccacctcccgggttcaaacgattctcctgcctcagcctcctgagtagctaggattacaggtgtgtgccatcacacctggctaatttttgtgtttttagtagagatggggtttcaccgtgttggtcaggctggtctcgaactcctgacctcaagtggtcctcctgcctcagcctcccaaaatgctgtgattacaggtgtgagccaatgtgcctggccagcttttccactttgatcttttgaaacacaaatctgactgtcttagctcccacggtgttgcctcgctggaagccaccagtccctgctggttaactctttcctggagacaccagcctccttggcgctggttctcagatgttacgtcccctctgcagatatggctgagaaggacaccacctttgaggcgccacccctggggacccagccggactgcaaccccaccccagagaatggcgaggcgcctgccaggtgactcccccaccccttctctctgtttggctgctgcaggagggagctgtccctgccatgcccaggggatgcctgggaggcagctgggctgggggtggaggtggggcctgggctgctcttttgttaaatgtgtgcccatctctttgctgacaccattggaaagccagaaggccttgaaacccagtccctgccctcaaaatgcctggcagagactcggggcagaggatctaggggcccaggctctggttgcgcagtctccagagaaagggaattattcctgaagacccacttccctcttcccatcttcatcactcctgccttgggcttctccccgcagcaccagccccactcagagcttgctggtggactcccaggccagtaagacgctgcccatcccaaccagcgctcccgtcgctctctcctccacggggaagcccgttctggatgcaggtaatggtcccagcccactcacccctactcccagcaggggcttcctcctggggaagtgtggattgggggagccaggagggagcttctcctttgtgggtatggtctgagaagggggattaaggttgaccccaggtttctggcttcttgagttggtgctgtggctctggcacttgctagtgactattcttttctttttgaaacagtctcactctgttgctcaggctggagggcagtggcacccatcttggctcactgcaacctccacctcccaggttcaagagattctcctgtctcagcctcccgagtagctgggtttacaggcgcttgccaccacgcctggctaaatttttttttaatttttagtagagacggggttttgccatgttgtccaggttggtctcaaactcctgacctcaggtgatccacctgcttcagcctcccaaagtgctaggattataggtgtgaaccactgcgcctggctgctagtgactattctttaattcttgtaggcaggaatttttttcacagcttcatcctcgtggcttataattgctactcagaaaataggtctttgttgattgatttcatgactttgactagttgttcgagcctttgagcctcagttgtctcatctatacaatggtaatggcagagaccgtgcagggttataagcagtgtagcattgtagacggcctctgtcagagttagctcttaggctggacgcggtggctcacgcctgtaatcccagcactttgggaggccaaggtgggtggatcacgaggtcaggagtttgagaccagcctggccaacacgatgaaaccacatctctactaaaaatacaaaaattagccaggcgtggtggcgcgcgcctgtaatcccagctactcaggaggctgaggcaggagaatcgcttgaacccgggaggcggaggttgcaaggttgcagtgagccgagattgcaccgctgcactccagcctgagcagcagaatgagaatcagtctcaaacaaaacaaaacaaaacaaaacaaaacaaaacaaaacaaaacaaaacaaacaaaacccccaagagttagctcttagggaaagatgccaggttactcattttaggacttgcagttctagtggctgacacgaggtggcagtagtgctccggccagagtttctgaaagtgcggtcccgtctggcagcattggcaccggctgggaacttgttaggaaagcaaattatgggccccatcccagacctagagaatcagaaactgcactttaacaagatctccagggcactcatgtgcacattaacgtttgagaagcacttaactggcatatactactttttaaacatctaaacatggacttcaataaagtgcaatcactagctctatgatctctgtaagtgacaaaagggaaaaacgaagcgagtttagtaccgaggtgtgaagaagtagatctagataggggttaagagcgtggccctgcagtccccccggcctggcctggcctgggctggggctctgccacttactctcagggtgaccttgggcaacttaacgaactttcgtgagcctcagctcccctcatttttaaactgaaggtagtgacggtgcctagggcatagggttggggatcattcattcagggaacgcttgtggggtgtgtttatgtgcagtggggactccatgcctgccctcatcaagcaggtctagagggttggccgggaggggactgggttcaacctcttccttcccctcactgcttggccctccccaccctgactccggccacaccagcagtgctgccagatgccggtcacaccgggccctcgtccacagtccccaaattttggtctattggacctcaattcctttgttctggctcctagacgcctcaatttctcactctctagacacagtttgcccttctctcagccttcaatagttgatcagcttcctggagccaggcgagggagggctggatgagataagagccttggcttggaaaggacctgttgttgttagccatgatggaagctgtgtcccaggagaaggaggaagtcgtctggggctggggctgtcttgtgtggttgcagcaaggcaaagagtgtggggcgtctctgtgttccagggccagtgctcttctgggtgatcctggtgttggttgtggtggtcggctccagcgccttcctcctgtgccaccggagggcctgcaggaagcgaattcggcagagtaagtggctgtgtccttggggccttggggaggacaggttgctctctgccagcctggcctgggttctttccctgcctgctcctgctctctgaggccgccacccccagccttcctcctggtgtcgtttcagagctccacctgtgctacccggtccagacctcccagcccaagctagagcttgtgggtgagtgtccagccgtccaaaggggctgcccgagccagaggaacacagggcagctctgggcccggggcgtgggctccagagactgaacttctaccccagcctcgaagctccctgtctgtggctcctgtcgcattctgtacatctgtagggatgcaatgtgggtgaaaactcatgcgtgtggagaatgcaatgaggtgaagactgtactgggtgtgacgactgtgtggcttgcccagagcagcacctggatggatgctggcatgaacgtttaaaagtctatcttgtctgtcactttttcctccagtacccccagggggcattcctgccagccttgccttcctctctacattctaccctccctttctccctctccctccttctctttctctttcccctctctccccctcttctaccacctggcaagtcagcccaggggcaggaggggaaaggagcacatggggcaagagggaccctggttctgccacttacaagctgtgtgaccccgggtgagttactgaattgtcctgtgtctcagtttcctcatccggaaaatgcagatggtagaatctacttcagaggcttggcctgtggattcgtcgaggtcgggctgttaagcgcatcgtggagtacctgcctgcagtcggtggctgctgcctattgacaggctggcctgtgcctggggctttttccttcctggaagcttcaggccttcctgagtcctgggtgcttctgaccccctccctggtccctgcactctgatccctgcccagcctctgggccagctcttccaggcagcccttgggagctggaaccctcctcacctgtccaggcagggtcgtctatacagcgtgtgtcttctagctctcacctggggcagggggctcccagctatcttgtgccaagcaccttctctctcctgggcagccccttcaaggcaggccagggtcttcctcagcactgcatggcatggattgggtgcctgctctgtgctgggctctgatgggggaatcgtctgagccttcgtttctgatttgcaaggtgggctcccatacaggcttcctgtactcccccagtgatgacctttgttctgcaaggaggaggcagggctcagcaaggtggacggctggcccagggccacacagcctggcagtggcacagccagcctcaggcactggtcctaggggttttggtttgtaaagggctcagccctgtcccctcttccttccccctgccagctctgtccaccatcgcaatgcctacccaagagccacgtgctcagcctaaggccaggccctggcccgtcccctgatctccccaggacccttgcagaggcccttgcataggctgactgttgacttgggcacaaaaacacagtccactgaggcatgttttgaatttgacgagtttcacaagcaagcactgtggtccctgtgcaaggggggtttttgtgttttgatagtttcaagcctgtttccatgacctgtcaggctgagtgtctcattgaaaccggcgtttgctttcttgacatttttctagtattagaatttccattgccgtcagtttattttttttcttcaaacctctgtgagagcagttttgttacagaagaaaaaaagaaagaaagaaagaaaacaccttcccctaagaagccaggtctacaaagaactgagccctgagactcaatggtggacatcttatctcaggtcgtttttgaccctctagcttctggtgggaccttggggtctgggttccgaggctcaagatggacagaaagtgaagccaagacaggcaagctcacagggcaccgggtgagaatggaccgagctggccggatgcccctttccctcctgagccgtgggtggtgaaggagggaaggagcactggtttattggcactggtttattggttcgttcattcatctattcacatggtcttcacggagcacttcctccttgcaggctctgtgccgggcccagaagctgttctagctccctccaagcttttagactaattccgactgcccgcagaggccaaaggcagacgggaggggagtgtgcgccccttggcctcccacatcccagacctggggcagagggtgctcttggttcctttgagcagtgagcacatcagggatctgtggtccgtgcaggtgcgatgagaggcccaccaaccagccctcgagtggatcaaccttcccgtgtgtgtcctcggtgacaggcatttgcaaagcacacacgtgatctcatccactcctccggtggcctgtgaggtacttactgttatccccgttgcacagattagcagcctaaggcacaggatggtgaagtaattcgtttaaggccacgtgctgggtgagccgtaggacggggattttatcgtggttgttgagatgtttgtaaaaagatttttcacccttggcaccattgacatttgggaatggatggttctttgctgtggagcgctatcctataggacgttgtacagcccctctagatgccagtaaccttccctacttgggacaaccaaaaatgtctctagacattgccatgtggcccctggggaaaacctcctggttgagaaccactggtctaaaattctttttttttttttttttttttgagacagagtctcgctctgtcacccaggctggagtgcactggtgccatctgggttcactgcaacctccgcctcacgggttcaagtgattctcctgcctcagcctcctgagtagctgggattacaggctcctgccaccatgcctggctaattttggtatttttagtagagacggggtttcaccgtgttggccaggctggtctcaaactcctgacctcatgatccgcctgcctcggcctcccaaagtgctgggtttgcaggcatgagccaccatgcctggccttaaaattcttttaatccttcatttttatgagcacttgagtcaatttctattattccagggagatttaggttgaaagaaattctttttttgttttgaaacagtttcaaacttatagaaatggtataagtatgaagaattcattttgacctgaaccatttgagagtaactgactgactggatgtctctcaccccgaaaacttcagtgtgtgtttcagacagacaagggtgtattttacacgatgtggtaaggatcgtcagaattggaattcacactgatacatgacccacaatgaattctcaggccctgttgaagtttctttatttgtcccaataatgtcctttatagcagaggactccagctcagggccacgtgttacatttgcttgtctggtttctcgagtctccttctgtccggatccgttccccaggcgtttctttcacttactgggaagagcgcaggctggtgatttcatggatgctccttgctttgggtttgtctggtgttttctcccgagtggattcaggtcatgcatcttgggctggaaggtcccaggaatgatgctggcctcttctctctcagggcgtcctgccaggtttcgatgtctccctttcctggtgctgtgtactttgagcgctcgacggaggtgatgtcctgccgggcctctccactgtgacgtctccatttgctcctcggtcattactaagtctttaggggcgttacttgagactatgtcaatagcccattcttcagcagaccttcattttctctatttatttgtttatttttttgagacagggtctggctctgtcacccaggctggagtgcagtagtgtgatctcggcttactgcaacccccgcctcctgggttcaagcaattctcctgcttcagcctcccaagtggctgggattacaggcgtgtgccacacaatgcctggctcattttttgtattttcagtagagacagagtttcaccatgttggccaggctggtctcgaactcctggcctcaagtggtcctcccgcctcggcctcccaaagttcagggatgacaggcgtgagctgccaccgcgcccagcccagaacttaattttcttcacttacatatttatatctgtatggattcatggggccctgttctgttcaatgggttgtaatctcttaccatcattttttattttggtgctcaaatggtcccagatgaggtcagggagagcccctttaagctggctcttgtgtgctttggtgtatcctcatcctgtgctttgagcacgtcccttattctgagatgttcccagcttaacttgtgtgctcctgccccggccctggaatcagctgcctctccaaggagcccggggtttgcatctcggggtacctgttgccaaagcctagctgaacctctgtgccaaattccccccttgggcctgttctgcttcccacagcactggggaatcacaggccagagaggggaggggactaaaagtggagaataacagggatggaagggaccgagagctttacatcgcatgtgagaacgcacgtgctccgtgagcgtgggcttcagagcagcctgtgacaccgtgcacttgtgcaagggggcctgctgctgcccagcatggtcctggacttgtgtccctgggggtaccagacaggcttacaagaagacagtggttattccaaaaggcaaggaaaccaacaaataagactagcagatagaatcaacatttttaggggaagagcagttatgaaatctgacctctgtacttggcaagatttgttctgggtctttatcaaaatcctcatgggttgtaacacggctcttgtcaatgtcagagccttccagattccgcctttttacctctgtgattttacacttgtttgggagagtcggtattgaactctgactttccattcagtgtgacggagtgcagagccatgttacttaccatcctgggcttttcctgaacctgctgtgtgctcaacagcatcctggacaccttctttttaaaatattttaatttttaaaaattctaagtaggccaggtgtagtggctcacacctgtaatcccagcactttgggaggccaaggtgggtggatcacctgaggtcgagagttcaagaccagcctggccaacaagacaaaaccccatctctactaaaaataaaaaaattagccaggcatggtggcacacacctgtaatcccagctactcgggaggctgaggcaggagaatttcttgaacctgggaggtggaggttgcagtgagctgagattgcaccactgcactccaggctgagcaacagagcgagcctccgtctcaaaacaaacaaacaaacaaacaaaaaaacattctaagtggccttcatttttaagttttttgttttttgttttggagacagggtgtcactctggagtgccatggtacaatcatggctcactgcagccttgacctcctgggttcaagtgatccctcagcctccccagtagctgggactacagatacacaccaccacgcccagctaacttttctattttttgtagagaccaggtctccctttgttgtgcaggctggtctctaactcctgagctcaagtgatctgcccacctcggcctcccaaagtgcttggattataggcgagagccactgtgcccagctagtcctcattttttttttgaggcagagtctcgctctgttgcccaggttggagtgcaatggcgcaatctcagctcactgcaacctctgcttcccgggttccagcaattctcctgcctcagcctcccgagtagctgggattataggcgcgcgccaccatgcccagctaatttttgtatttttagtagagatggggtttcaccaggttggccaggctggtctggaactcctggcatcgtgatttgcccacctcagcctcccaaaatactgggattacaggcatgagccaccacgcccagtctcatttttaaaaatagttttagatgtacagaaaattggagaagacagcacaggagttcccacatgccccacacccagtttcctctgtgattagcatcttaagccagcatcgttcatttgtcgaaatatgtgaaccattattgacacaggattacaaacgaaagcccacactgtgttcagggttcccttgcattgcctaaggttccaggatcccatccaggagccacgtcacattcagtcatcatgtcgccttaggctactctggcctgtggccgtttctcagatcttgtttctcaagaccagtttccctgatggccttggcagtttttgagtattgatcaggtgttttgcgggacgcctgtctcctgggatctgtctgatgtcttccccatgattagactggagttatgcattgggggaagaagaccacagaggtgaaacgtcatgctcatcacatcaaatcttggctgggcgcagtggctcatgcctgtaatcccagcactttgggaggccaagcctggcagatcacctgaggtcaggagtttgagaccagcctggccaacatggtgaaaccctgtctctaccgaaaatacaaaaattagccgggtgtcatgacacgcacctgtagtcccagctacttgggaggctgaggcaggaggatcgcttaaaccccagaggcagaggttgcattgagctgagaacgtgccactacactccagcctcggtgacagagcgagactccatctcaaaaaaaaaaaaaaaaaaaaaaaatcaacctgatttaccactgggcaccttcacttttgatatctcttttaatcttctcaacaagccccaaagttgatgtgattcatcccattttccagctgggaggacagaggctcggagaagggaagtaatattgtgctgagtttcaccgccaaggaggcccctgctccagggtggctaagcggcctcattgtttttgacatttggctggttttcaatttgagggttattataaacccgctgctgtgctcggcctttttgttttctttcgggttatttcctgagggtgtgttccctcaagagggatgactgggtaaagagtgtgaggtttttgttgccagatggctctttagaaaaatggaaccagcctgcagggtatgggcagctctgcgatcccgttcacccacttccccttcaaggccgagttgtgtcatttttatttattttgttttgttactttgtcacactttttttttttttattctgttggccacccccagtgacttggtaccaaagaacagttggctgcttgtaaaactcaaaatcactctggagggaccatgatttagtttcactgacgtcattgaaaagaatgtgcctcggccgggtgcggtggctcacgcctgtaatcccagcactttgggaggccgaggcgggtggatcacgaggtcaagagatcgagaccagcctggccaacatggtgaaaccccgtctctactaaaaatacaaaaattagctgagcatggtggtgcgtgcctgtaatcccagctactcgggaggctgaggcaggagaatcgcttgaacccaggaggcggaggttgcagtgagccgagatcgcgctgctgcacttcaccctggcgacagagttagactccatctcaaaaaaaaaaaaaaaaaaaaattacccctggccgggcaaggtggctcatgcctgtaatcccagcacttcgagaggccgaggcgggcagatcacctgaggtcaggagttggagaccaacctggccaacatggtgaaaccttgtttctactaaaaatacaaaaattagccgggcgtggtggcacatgtcggtaatcccagctacttgtgagaattgcttaaacctgtgaggcagaggttgcagtgagccaagatcgtgccactgcactccagcctgggtgacagagtgagactctgtctcaaaaaaagaaaaaattacccctaagagtgtttcccaaactcacctagtgtccacacagcgtgttcaaatggtcagtcttgcgtatactttatcctacttgttgactgagcactggtgagcatatctgtgaggactcagggctggtggctctccagagctgctgaagtcagagatgtgtgcaggaggcggcgtggctgacatacgggcatcttggtggcagatttgtctagccagggatgtgtgcctgacaacagcatattccagatctccgtaggtagcgttctcaggagtggttaaaagctgggcatccctggaggatggtctgctctgggaactgacttgctccaggatgagctagatgcccggatgccctctcacctttctcagatggccagtgagccaaggttaaatgttaaatgtcaatatgtgcttgggcgtgacctggcccctgtttaatatgggagaacaatgggagtggagggtagaggtttgagatgagaagatagaggttgtgcgttgagaatcattgtatcagcacctcctgagcctacaaaaggatgggattgaaggaaatgagatggcccgagagcagttgtcctcctcgaaggctgccacctgggtgctttcaggcacaagaaagagaaaatcgaagtccagctggagtcagaagggctccacagcagactggcttcgggcgtgtcccaggcagggtccaggtggcatctgcaggatccatcatcctgtctccatgacctgccttgaggtcctccatgtgggttttgcctggtattccagagaattcggggctctccacaccctggagacagtaaggtgggcgcagcagccacagacgagcctctgacccagtggaagcctcctgggctctggttgggcctgtgcttctcgtgaaccaatccttgcatgtgcgcgggggtgggggttgggagagtggttcagtgtgttcattggtttagtcattaggaatgagagtggcagccaggtgtggtggctcacgcctgtaatcccagcactttgcaaggccaaggcgggcaggtcaggaggtcaggagtttgagaccggcctggccaacgtggtgaaaccccgtctctactgaaaatacaaaaaaaatagctggggttggtggcacgagcctataatcccagctattcgggaggctgaggcatgagaatcacttgaacccaggaggcggaggttacattgagccgagatcatgccactgcactctagcctgggcgacagagtgagactccatctcaaaaaaaaaaaaaaaaaaaaggaatgagagtggccaggggatagaggtggtcccctgtcctccatctgccactggagaagtgagcctccttgccttgagctggggtgggcactgactctgaaacccatcgagggctctccagactgaggacctgacccctgggctgagttcagcaccacctgtgatccaggaggaccatttgccaatagttggggcgggtggggccgggggctgccagactccttggtgaagttgctgctcttgctttttgcagattccagacccaggaggagctcaacggtaagtacccctcccttgcccccacctcagcttcgtgcccctaaatctgactccttccctaacagatctgaagttttgagagctgctgggggaagggagagggaggggacggactggccattcccctcccacagtgcccagggtgcaggcccgtcctgcaagttcaggctgagtctgacccaccacagggacctctgtgcacagaggcctcgcctggggcctcagccaggccttggctaaggatggagagccccaccctcatagcagcctccagctcctggctcagcctgccgggaatttccagaagggcctgcacacagtggatttggtttgggccacttttgggtaccaggtctggtcaggaggaagactgtgttcattttccccttttctttactcttccatgaatctcatcctccaagctggatgacagagcaggtggctatggtccattcctttttttttttttccccatctgtcagttcttccattactttcttttaattcaagcattcatacattaagaagggtttctatcctttcatttttcaatataatatacacaaccataatgctagttcagtttcaaattatgggggatcacattcgaatatgcttggatgtgacaagtggctgttacaatactgagaaatttcatgaaagaggtattcaacaatttgtaaggtaatcaaatatgtttttgctgcataggccaatgcattaatagtaacttgttttaaaatgcagtcttttggccggatatgatggctcacacttaaaatcccagcattttgggaggctgaggcaggcggatcacctgaggtcaggagttcgagaccagccttgccaacatagtgaaaccccgtctctactaaaactacaaaaagtatccaggtgtagtggcacacgcctgtagtcccagctactcaggaggctgaggcaggagaatcgcttgagcctgggggacagaggttgcagggagccgagattgcaccactgctctcccagcccgggtaacagagtgagactccatctgaaaaaaaaaaaaaaaaaaggcagtcttttagccttcatattattatgaaagagtattcaagagtatgtattaaggttggtgccatttgccattaaaagtaatggcaaacctggtttaacccttctgataggtagttgtggatgttggggttgagaacagaataatctttgtctggagtgacaccacactctagaatttccactttgaaaaatactcagttctttttttttttttttttttaatttttttagtatttattgatcattcttgggtgtttctcagagagggggatttggcagggtcataggacaatagtggagggaaggtcagcagataaacatgtgaacaaaggtctctggttttcctaggcagagggccctgccgccttctgcagtgtttgtgtccctgggtacttgagattagggagtggtgatgactcttagcgagtgaagaatactcagttctaagctgtggttcctggtagaacaaactttatttttctagctcagcagtgatctggaagctgaggaatctcagcgccttttaaaagttattatgtggttttgttttaaaaagctcctgttttgggaaagtagaatttatgggtataacatatgttcattatttgtacataaaataaaaccatttaaaaagtaaaaaataataataataataatggcaaagacgtgattacttttgcaccaatctaaaagatacgccctctgtgccttgagaatcattgcgtcagcacgggcatccctgcctcctctgaattactcacactcactccattttgaaggcatcaggacatttcatgaggccacttctttgcccttacctgtaaaaatcaaaaactaaactgacactttcctcatgacatagctgtttttttgtttttttttgttttttttttgttttttttttagcatttagaaaatatttattaataatatacatgaatttagattatatagtatagaggtcaccgggcttgtcacttgaactaacagtagtctgtttttagaatgcttgagtgtgatcataaaagactactttccaggatgtcggggctggggagctggaggggctgctccaggaggtgggggacctggagctggtacttacagacttgggtgcttatgagtgtgggttatggaccagatgccagggttcaaatcctagctcagatacttattgatggtataaccctgggccaattactcgactcctctgtgcctcagtttcctcatctgtaaaatggggagtgggctgttacccacctcatacagtggttgtgaggattaacatatgtcaaggactttaggacagggccaacggacgtggcgagcaccctgtgagtcgctgactgttacccctactatttagtacaaattaaaagcaacagacttcacccagaaagctgagaagcccggggcagctcatggcagcttttaaagcagaaagggagactcactggggtctgtagagatgaaaaaaaaaaggggcctcccagttcagagactggtggggaggttgggggtaccctgcagcagcacccattcccgtcccacagcagctgaggagtggtgcgtcggtgacagaacccgtcgcggaagagcgagggttaatgagccagccactgatggagacctgccacagcgtgggggcagcctacctggagagcctgccgctgcaggatgccagcccggccgggggcccctcgtcccccagggaccttcctgagccccgggtgtccacggagcacaccaataacaagattggtgagtcagcctgttttgggaggtcccctgcagcccaggggcagatgggagatgaatacggggccctgggccctggaagggacctggagaccctggagttgaaaggcccaggaaaggagaggcatagattcttcaccccaactgaagtttctgtaagtagggacagcgagggtacttacctcgtaggccattgtgcggattcatgagccagtgtgcatgagatgcctgctgttactcataaaaaacgaacaccaccccagcccccaacaccgagcacccgaggggacaggaggaagacgtgccagtggtcacaggacctgccacttgtctggcgcattccgggcactgtgtaggtgccatctcttcatctctgatggtctcaccaccttctttggatggtgtctttctccccattttacagttggggagaccgtggctcagagggtgaagtgattttccccattgcatggctactaagtggcacagctggaactcgtcccgcatctgctgggccttgaagcccgtggtttgtccacgttaccacccaccctctgcagaagcaggaggacagatggggcccagatgttcagagcttcccaacggcagctgctgccagcctggacagacattggctttggcctcctgtgggcctccctgcctcctctcttgcttctcatcaccttggtacggcattttccccaaaatgtatacctgaccctattgcactcctgccgagaagcctccagcagcttcccattccctatgggatgaattccagcattcttattccagcactcaaggctgacagcaagttgtagctccccgaccagactcacctaccttctgaccccacagtctgtccctccccctcatggcagtctcccaaatttacagacccctctgtcacttctgagcttctcaatgggagctaccccctcgcctgaaatagccaactccactgccttgaatccagttaattctggatatcctggggaccctgcttatttgccccttcctccaggaagccttctgtgccctctccaccatgctatgctccctaagaacccaggcctcccctacccggtgtcctagcacccagtggtgtgactgcgtgtttatagccttcctccacctccacctggctttgtgctccctgtgggcagggccttggtggaccccacctctgtcgcttctggaagggtaactggcactgggataatactgaagagtcatttgtaattgtcctgtgcatttctatggcagacagtggtggccagaactcttcagggcagtcatcttctctttttattttttcagcctcctgagtagctgggattatgggcgagtgtcatcatgcctggctaattttttgtatttttagtagagatggggtttcactctgttggccaggctggtctggaactcctggcctcaaggtgatctgcctgccttggcctcccaaagtactgggattataggcatgagccaccatgcccagcctgggcagtcttttgtaacaaactgaagcttttgaaatggtagcttttagtaagttttatttgaaaagtatgtattttgggaaataccatcaaaggcttcttcagaattcctaagaagtcctaactggaacttctgagtccacactgagtacagtgcctggaatcccaggggtggggttcagagggtgtttgatggggaggagaaggaagtaccaggctcccaggcagctggctcaggtgtgggctgccctcccctggcatggcctgcaggccttgctggtgagtggatcgggggccacctccgccatggtggaaagggaaggccttggaggttctcttgggcacccaagacacaggcaacccccttgtcctcctaatgccagcccagggtagcgttcccccttcccatccagttcccaagaggggtcacactggggtctgtacatcgtccctcttcccctgggaaccaggcaagggaagaacccctttccccccaacttcctcacctgccctccccacatagccaagatgaattccctggactctggagctctggggagggggcaggaaatccatgcagcccttggaagccacccccacagcctggggagtaggcagcctgtgatgggggcagagccagagcggggcagacccctcatggccggctctgaagtttccagacccctctttcacttccgagctcagtgggagctgcttcctcacccagagcagccaattccaccgctttgaatccagttaattccagatttcctggggactcctgcccatttccctgaggaatgtgaggggaccagcctgtccccagctgtggctccttctccctaatccagcacccccaccctcacttccctcccacctgaccccacccgcctctcatcttctctgcccatccccctctgggccttctctcccctcctggggtctcctctctcaccacccccggcccccatcttttgcccagccctctatagggctcctagggctgggagcccacaagcctgatggaggtgtggggagtgctgaggccctgctctgttttggggtctgtgggggcgcccagcccatagcctgtcccgcactctgggccttctcctcttgctgccgtttggcgcacttctctctttcctgggggtgttcaaaaccagaatagaagaaccagcgtcatgcaatagggttgagggtgtgggggactcgagaacctttttggggttcctgaatccgaggggtataactgcattacccagaaaggcaggggtccctgcacccccaccccaccccagctctcaagttccctcttgagcttccccattctggcctccagagtccagcgcagaacagctgggagccagcccaccctgagccagacaccatcagctgggcggaggccaggcttccccactccccagctcctcgggccactgaacctgagcccccatgtcccctctatcagaaggccacaccagaagcccccacatcagactgtggcgaggaccggccctccgtccaagctcccaccatgtgctcacagcacagccatgcacgctgcaggcaggagaccggctgtgagcagtaagccccgaaattcacggcctgagccaggctgtctcaatcatgggctgccgagacctattgagggggccgggttttctgcaggatgtgacaggctggctgagtttgcccggaccgaggggactcccaggacacgggacttgcagtagtagaaccaggaatgttcccgggcaagctggacaagttggtcaccccgggttttggctgcaggcacacagataggagcagaaagggccaccaggcggagtgggtggtttttttttgggggatttctcctaactacgtggcgaccttgggcaggtcatttaacctctccaggcttcagattcttacctgtaaatgggaatcttgatggggtccgccttgcaggagggctggggacccaggagtgggggtgtggaaactgctcagctctgctgtttctgctcgtgctctggttacccacggctttgcctgtttttgtccacagtttgctttctgtcccaccctgtcctcttcttccctacccatccgcagagatgtgctgagaaaatcctaagtacaagtgggctggttcttaactcctcaaggcccagctcctagctgttctatttcctctgagcccccaggatgcctgtaaggtacatcagagaggctgtgccatcagcctgaagccacccggcaggtgtaccagcactgggcctcggcccttctctgcctctttgctcccatcctggctggtgctctggcctccctcgctcacccatccttttgccttgcagagaaaatctacatcatgaaggctgacaccgtgatcgtggggaccgtgaaggctgagctgccggagggccggggcctggcggggccagcagagcccgagttggaggaggagctggaggcggaccataccccccactaccccgagcaggagacagaaccgcctctgggcagctgcagcgatgtcatgctctcagtggaagaggaagggaaagaagaccccttgcccacagctgcctctggaaagtgaggcctgggctgggctggggctaggagggcagcagggtggcctctgggaggccaggatggcactgttggcaccgaggttgggggcagaggcccatctggcctgaactgaggctccagcatctagtggtggaccggccggtcactgcaggggtctggtggtctctgcttgcatccccaacttagctgtcccctgacccagagcctaggggatccggggcttgtacagaagagacagtccaaggggactggatcccagcagtgatgttggttgaggcagcaaacagatggcaggatgggcactgccgagaacagcattggtcccagagccctgggcatcagaccttaaccaccaggcccacagcccagcgagggagaggtcgtgaggccagctcccggggcccctgtaaccctactctcctctctccctggacctcagaggtgacacccattgggcccttccggcatgcccccagttactgtaaatgtggcccccagtgggcatggagccagtgcctgtggttgtttctccagagtcaaaagggaagtcgagggatggggcgtcgtcagctggcactgtctctgctgcagcggccacactgtactctgcactggtgtgagggcccctgcctggactgtgggaccctcctggtgctgcccaccttccctgtcctgtagccccctcggtgggcccagggcctagggcccaggatcaagtcactcatctcagaatgtccccaccaatccccgccacagcaggcgcctcgggtcccagatgtctgcagccctcagcagctgcagaccgcccctcaccaacccagagaacctgctttactttgcccagggacttcctccccatgtgaacatggggaacttcgggccctgcctggagtccttgaccgctctctgtgggccccacccactctgtcctgggaaatgaagaagcatcttccttaggtctgccctgcttgcaaatccactagcaccgaccccaccacctggttccggctctgcacgctttggggtgtggatgtcgagaggcaccacggcctcacccaggcatctgctttactctggaccataggaaacaagaccgtttggaggtttcatcaggattttgggtttttcacatttcacgctaaggagtagtggccctgacttccggtcggctggccagctgactccctagggccttcagacgtgtatgcaaatgagtgatggataaggatgagtcttggagttgcgggcagcctggagactcgtggacttaccgcctggaggcaggcccgggaaggctgctgtttactcatcgggcagccacgtgctctctggaggaagtgatagtttctgaaaccgctcagatgttttggggaaagttggagaagccgtggccttgcgagaggtggttacaccagaacctggacattggccagaagaagcttaagtgggcagacactgtttgcccagtgtttgtgcaaggatggagtgggtgtctctgcatcacccacagccgcagctgtaaggcacgctggaaggcacacgcctgccaggcagggcagtctggcgcccatgatgggagggattgacatgtttcaacaaaataatgcacttccttacctagtggcccttcacacaacttttgaatctctaaaaatccataaaatccttaaagaactgtaaggctgaggacatgatcatcgaaattgagagtatgttattaatagaacccctgagcagaagtggctttgggagtctcccagcagggcagggattcccactgaacccccaggcactaaggtggccagtctctggtagattggatacttctggggccgggagcccacttcctgctggggcagtccttcttgttgctggaagattttccttatcactcgaggcaaattctttctccatgtaattgccgctccctggtccaaaggctgccctttgaggacactcaaagccactgtcggccagttgcggtgcctcacccctgtaatcccagcacactgggaggccgaggcgagtggatcacctgaggtcaggagttcaagactagcctggccaacatggtaaaaccccgtctctgctaaaaatataaaaattagtcgggtgtggtggcgggcacctgtaatcccagctactcaggaggctgaggcaggagaatcgcttgaacctgggaggtggaggttgcagcagtgagccgagatcgtgccactgcactccagcctgggtgacaagaatgagactccgtctcaaaaaaaaaaaaaaaaaaatgccactgttgtcacaaggctccctttaggtattcgaagaaaggtttctgggcctccccatggccttcctccctctgggctgggccgggcagccccatagctttggagaagggattctccaaggaacagcgtgagtgcccaagccctgggaggcagggggaggaccacaggtatctgggatccctgggaggcagggtgaggaccacaggtatctgggagtgttgggcttcagtgtctgagctgggaggagcccagcctgcctccctgggcacagctttgtggcactttagggccagcctccaccccaggcagccagcctgaggcctcctctgactgtctcctgtgcgaggtggagaacacccacagccacagacagaccctgtccaccccatccccaagactccagcccacacccacacatcagcccagccattgaaccagccatgcactcagtccaggagccagggtggatttccccatcctgcccagcgatgagcggaccccttctattctctggctgtgctcacgtccaggttggcagatggacagagctccctgctactcaaggtagcaattctcaggctgtgacgacacccccacacacctcttcctaaacatttgcgatcagagagggacagcaagtggtaagtatcagatggaagctgttgccttcaaagaaaagccattgtttcccaaggcacttttgtaggtggtaaaaaccattctacagttcacagaatctccacggctcgggtcagtccctaaaacggaacgaggggacctccctagagcgtctctcgctccatcacgacctcaccctccaacagtgaggtgtaaaagacccaaggctgggtcttggtcatctttgtcccatggtcactgggcactgattggttgggctaagtagaaatgaaaacctgtgtggggatgagaggcggctctccagccacagttcctcgggtgccttctctcttccccccacttcctcgatcctctgcagtgggggggcaagtgtggggtgggggttgcttgggccagaatatgtggggacatcagattcacagccacggcccaagagaaaagcttagtcaaggcgagactgttcagcttcaaggggggctccttgggctgaaggagaagctgctgaggacacctcaggcccctgcaccctccaccaggcccctctgccaggcacctcctcctaagccagcaccccatgctggccaaacaccctggaacccttgcccctggctgacccaggggagcaggtgttcaatgttggggccatgggtgtgagccaggcacagggcagagaggcttgcctgccattctctgcagctcagacacaacagcagcgtgcggatggtgatggcgctgcggggtcacacacaggctcgaatcccagctctgccatttatcagttgcatgagcttggctatgttccatgatctctttcagactcagttttcttgtctgtgaaatgggggtgtcagtctctacctgacggggttgtggggcttccctgacatgccactcggtgtgtggcttgtgctgagtggcaggttctgtccttattccagcctggtggccgcttgtcaagagcgagcccttcctatgtctgcagaattcagcccatcaaggttaatcagagctttcaggccagcctgggaacctagccacccttggggccaacttgctgtgggaagccccgcagtgggcaggcctcttcttgttctgtgggctaccccaagaacccttcagatcacagtcataggactggctcattattcgacgtctgtaactctgggcatgtcggcgaagtgctgcgggtccctccggagggacatctcactcgtggttctagcacattccagattgcaccacattactgttcgagggctttcctcaattaaagggtctagctgctgaggactagtggggcacagacttgctctcgtgggtcctgtgtctggtggacgggacagacggtggcgtcatcaaatcagtacacaaggtcattccagagtcagatcacgctgtgaaccacaaggagtctgagccaggtactgtggcagagtgggaggggagggccaccactagctaggtggtcagggcaagcctctttgagaaggtgccctttgaacttggcctgagtgatgtcacaagccagcgaggtctggaaggcagggagctgaagtgggcacactcctgcctcgagtttcaggaagaacacagtggtggaagaggcacggtgggcgagggaaaaaaggaggtgaggggggaaggcctggggaggagggcctggtgggccattgtgattaggcacctagattttatcataaaagtactggtctatgtttctttctgttttcttcctagtagaacaataaacatcctggtattatttcagcaatcagtgagaaaggccaaaccaggggcggcaaaggttgttttaacctattttggagggaagttggggaaacaggcagcagctgctggcagccaggaagcagttagatgggttttctcagaaagaactaagacagcattcctggtgatgattgtagctatgggtagggttaggagtctgccggtctagcttccccctttctctgggtatcttccagagagtaaaaaccaaactgaaaaaccctgggaagcctggaggcctttgtttgtgttttggtgtggtgattgttttcccggtcatgaggcagagggatcatttcagtatcacagggtcagcggtggcctgtgctttttaccctttagccctcatggaggcagtggccatttcatgacggtggcatggagctgtggcttccggctcgacaagctcccagctgcttggtcccaagcaaagcccttatgtgcgttcaatgtgggttttctggtctgcaaaatggacctaatggggccaggtgcggtggctcacgcctgcaatcccagcactttgggaggccgaggtgagtgggtcacttgaggtcaggagttcgagaccagcccgggcaacatggcaaaaccccgtctcgactaaaaatacaaaaagtagccaggcatggtggcatatgcctgtgatcccagctacttgggaggctaaggtgggagaattgcttgaacctgggaggcggaggttgcagtgagccgagatcgtgccactgcactccagcctgggtgacagaacgagactctgtcttcaaaaaaaaaaagaaaaggaactataaggctgagagggactgtggaagtccagtctgggcacgtatgccatgttcagtaaatgacagccatcaagagcagcatcttaagagctgagagttcgcctaggccgcattctttgtacatctgggcttcctaatagaaccctggacagtagataggctgggtggcagcactcccttttacaaactgaggctcggggagtgggggggagcgaagcaactggcccactgccacacagctgggaagtcccagagctggagttcaacccccaactttgtgattctaaatccctccccatgcccaggtggcctggctgcctctgtggtcaggggttgtgttcatatcgtggtcatcccctggcactatgccttctagataagtttcctttcatcttcaagtcaccacaactgagagatagaatagaggctgattttattcctccctttatgggaaggcagggacagttgcaagaggcagggtaacctgcccaaggtcaaactccaggctgggtgtggctttctgactgctctgaccggacaggaaggacacagagctaacccagccagggcctccttccttgacacagctttcctcaaaggtgtgtgtgattttttttttctttctttctttctttctttttttttttttttttttgagacagggtcttcctctgtcacccaggctggaatgcagtggcacaaatacagctcactgtagcctcaacttcctgggctcacgtgatcctcctgcttcagcctcccgagtagctgggatcacaggcacgtgccaccatgactggctaatttttttttttctttttttgtagagacaggtctctctatgttgcccaggctggtcttgaattcctgggctcaagcaatcttcctaccttggcttcccaaagtactggattacaggcgtgtgattctgaggtccagggagactcggggctgggttgagtccagggaatctctgggggagaactgcctgagagtggaattgccctttccatccccagtaacacctcatatcctgctcactgccccacctgaggctccctgaaggaagacgatcaagaacaagcctcccattttacagatgggaaaactgagccccatagaggcaaagcagttttcccagggtcccagcttggtgctgtgtgatggagatagctctaactgtagctgtcagttggggctggggtaggggaaagtcactgtctagtccaagggagcagtaaagatgacatgctgattttcattcttcctttaaagaaaaaattgatgttaaaagtaactgtggtgagagggttgggttcttacttacaaggcagctttgcaagagtaaacagagtagacaaaaatatcccatcagctgggcttctgcagcttcacaagctactgatccgtgcagtcagagggccccaggttcagaagggccctgggcttggtttaatgctctgctgtcgccatcttgaaagtgatgaataatttttggcaaggggccctgtgttttcatttttcatggagttctacaaattatgtagctgatcttgcatgggggcagggaaatcgttaattcagaattcacttaatgccaaagcattttacctccattgtcatgtgacctcagagggaccttatagatgagcacacatgtccccatttttaagaagtgttaaatgaccagtaactgatgtaactgttccagtcatctcttgctacataacaaatcacctcaaaacttaatagcttaaaacaatggtcattaattttgctcacaaatctgcaatgtggcctggacttagcaggggaggtgcatctcggctcacatagtaccagcgggggtgatgagatgagctggagaatccacctccaagagggctggcaaattggtactggctgtcagtttctctctgtggagcttcttgggcttcctcacagcatggctgctgggttcctggagccaacaactccgggggcaggaagtagaaactgccagcgtcataaaatttgaccccggaaactggcactgcatcccctttgctgcattccaggtagtcacagagcccagactcaaggggaggggacacagatcccacccctcattaggaggagtgtcaaagaatctcgagatcttatgtgtcagcaggagcacttcacatactgtctcattttagcctctcggtaattttgccattattgtccttggagttggctcaaggaagctacataacctggtggaatcccaagttcctctggctggaatttggatccaagctggtctgtctccagagtgtgagctctggactgagcagctgacctgtgcattcagggacccatacagtcagaatgtggcaggactggaaagcaagctcacatctgtctgattagagaacatctgagcttggtacccatacaaactaggccctatctagtttttagatagggaaatcaaggctctgagaggtcttgccaggcctctcctgaggaagagggcagggtctgggaccttccagggcaggatggggcccccaacttgggttgcacagaaccatgtcaggaagtcacatagagttgtgggtagattatgcaagtacaggctgtcaggagggatgttgtttttcactgcaattacacttcactcaggaaatacagcttctgcacgtactgagggagggttcctcaccctgtgcagaagacctcctggtgaataccggggcactcgctgggtgaccctgggtcctctgggccaagttcatgcatcgaaagttccctgagaagctctttgtgcccatctgggttgggctttgacaatagagttgaagaggctttattcctgccatgcatggagtcacaggttagtaagaaagatgataagagctgtacttgaggctttcgtgtgctctcacttaaacctcacagtgcactaggaagtagttattacattacccctatgttacagatgaggaaaccaacacgcagagtggctaagccagttccccagggtcacacagctgctaagtggcgcagctaggctttgaacccaggccacctggctggagtctgcgtcctcacacacttggccatgctgctccattgtggctcaggccgaggtcaccactgtgctgaggccccagccctgagtcccagaccctgtagaacactgtgcaggcatccatggggctcagtgaatgcacagggaatggaatttgctcttggtttttatcccacctttcctttccaaagcccagctgtggccaggcctctccctcacagaaccttctatgactccctagtgcctacatgccaatgtctgccaatccagctttgctgctacctccacagctcccatatctaaacctctcctgagacccgactgtttccgctcagtcaccaaatacagagggcatatcctcatcatgaaatctctgctcagcgctccaacccctgaatttccaacctcatctttctcctcctcctccaaaaacccttccaggacacccaggcccaggacctccaagctcccacagcactgactgtgaagggggactggaggccaagttctagaagtcttgcaaaaaatatctctgaagaaatgcattcattcattcatacagccactcatttagtcactcaagcaacagatctgtatgtaacacctactatgtgttgggcactgtgcttggcgctggggaacacagtgaagtggggcagtggcggggatatacagtactgctctcagggagtcacagtccaactgggagaccaacctagagtctggtcatggcctagagcatgatatttgctttgatggagagcagcttggggttcatgaccctagtggatggcacctagcccagatggaggcaggtctctgctttcccctctgtagaatgggtttaataagagcacctaccccaaagagatgttgtaaggattaatttcatccattaatttgttcaataaatatttgtcaagctcaaactccgtgctggggtgctggggacacacagccctgccctctgcagagtgacaagaaagagtatttgggataacattggctggtggtaattgctgtaaagaaaaaaagaaagtggtgtgtaggccctcagtgtggtgaggtgtgtagccagggcttggggatgtagcacctgctgtacaaaggtctgggagaatgtagcgattcagggtgtgcagggggaagtgagtagttatgatcatgagtctgtggtagacatcgccccatccttgcatttgcatctctaggtttctacagaagaaagggggcaaggtgatggagagaatttcatgggcggaaattgttctacaggagctggggaggtaggctggcagggctgagccggctacttggtgggaggttgcaacagcctcaggacgggtggaggactgcaggggaactggagcccaagggggtttccttccagggtgaaggggaaaagcaaggctgggcactttgggaacttctcagggaaaccctctcctgtaccctaggggacctgggctccattctggaaaggcagaatacatgacctccatcacgttttgggtctgcactcattaagcacttactagatgccaggcactgtagagtctccatctcagatccttacagcacccctgtaaagcagaggctatttatccccattctacagatgaagaaatggaggctcagggaggtaaagtgatttgtccaaggtcatggttgcgtaccagtcaatggcctgaacagagacttgaacccaggtctaggtgatggcaaagttgatgctatttctccttttgatataccccaactgtctaaagcagcccttttttttgctaggcttcttggtgtttgaaaatttaccactcattcctaggagctaaaggttcctgggttcctccttggggcacatgtctaggagcaggatctcgatctggtggcagaggggcagcagctgctccgtctggcatacagtaggtgctcagtaagtctgcggggcaggcaggacaagcctgggttggaaggaggtccagtttcttgggagtgagagcctcaagaccaacttcacctgaaggacaaatgagaggtggccgaatcactgccagctacttcaagaagcccctaggacactccagccaaggtgccttggtcccttttctaagtcgcctgcccaccctgcccaagctcctgcggggagtgtgcccactgtgactcatccacgcccagccctgcccagctctcactggggcagcagtaggcacacatactcgtaaaagtctgaataagtgaagactgggaaattgcaccagggaaaaactacttatttcttcctcttttgaattggggaggggaaatgttgcgggggaaatgaggtcagtgacgtggtgagcatttcatgctccttactgatgagcagagggccggtatcacgtgctgccttcctagggagggctgggtagtgcgtcaaggaaatgggcccagagctgtgtctcgtccagtctagcaggaaactgcccatctcactgtgtcactcccttctctgtccttgctctaagcctctaccctgactgcccttgctctgagctgaaatctcactaatgagaaaaaaatgtgctggtttatgcctctgtgggctggctgggctggtaggtcccagggggcagcatggcctggaggaaaccgagtgcacggggcaaggatgatgtgcacgagtggtatgtgactcccagggctcacagcctcatgcagcccctccctctgagagtatagatggggaaactgaggcctgagaaggcgagagatgtgcctgaggtcacacagagaatccgtggccctcagcacaagcacccagtttgctggtactttaaagataaaaataaacaaactttataaatggaaaagatgaataaaagaagaaacgaagtataaggaatatgataaatataataaaaattacacacaatcttggcgaggcacagtggctcatgctagtaatcctaacactttgggaggcccagatgggcagatcatttaaggtcaggagttcaagaccagcctggccaacatggtgaaaccccatctctactaaaaatacaaaaattagttgggcatggtg

SEQ ID NO: 1250 - DNA, 3622 bp, Homo sapiens
atacgggagaactaaggctgaaacctcggaggaacaaccacttttgaagtgacttcgcggcgtgcgttgggtgcggactaggtggccgcggcgggagtgtgctggagcctgaagtccacgcgcgcggctgagaaccgccgggaccgcacgtgggcgccgcgcgcttcccccgcttcccaggtgggcgccggccgccaggccacctcacgtccggccccggggatgcgcgtcctcctcgccgcgctgggactgctgttcctgggggcgctacgagccttcccacaggatcgacccttcgaggacacctgtcatggaaaccccagccactactatgacaaggctgtcaggaggtgctgttaccgctgccccatggggctgttcccgacacagcagtgcccacagaggcctactgactgcaggaagcagtgtgagcctgactactacctggatgaggccgaccgctgtacagcctgcgtgacttgttctcgagacgacctcgtggagaagacgccgtgtgcatggaactcctcccgtgtctgcgaatgtcgacccggcatgttctgttccacgtctgccgtcaactcctgtgcccgctgcttcttccattctgtctgtccggcagggatgattgtcaagttcccaggcacggcgcagaagaacacggtctgtgagccggcttccccaggggtcagccctgcctgtgccagcccagagaactgcaaggaaccctccagtggcaccatcccccaggccaagcccaccccggtgtccccagcaacctccagtgccagcaccatgcctgtaagagggggcacccgcctcgcccaggaagctgcttctaaactgacgagggctcccgactctccctcctctgtgggaaggcctagttcagatccaggtctgtccccaacacagccatgcccagaggggtctggtgattgcagaaagcagtgtgagcccgactactacctggacgaggccggccgctgcacggcctgcgtgagctgttctcgagatgaccttgtggagaagacgccatgtgcatggaactcctcccgcacctgcgaatgtcgacctggcatgatctgtgccacatcagccaccaactcctgtgcccgctgtgtcccctacccaatctgtgcagcagagacggtcaccaagccccaggatatggctgagaaggacaccacctttgaggcgccacccctggggacccagccggactgcaaccccaccccagagaatggcgaggcgcctgccagcaccagccccactcagagcttgctggtggactcccaggccagtaagacgctgcccatcccaaccagcgctcccgtcgctctctcctccacggggaagcccgttctggatgcagggccagtgctcttctgggtgatcctggtgttggttgtggtggtcggctccagcgccttcctcctgtgccaccggagggcctgcaggaagcgaattcggcagaagctccacctgtgctacccggtccagacctcccagcccaagctagagcttgtggattccagacccaggaggagctcaacgcagctgaggagtggtgcgtcggtgacagaacccgtcgcggaagagcgagggttaatgagccagccactgatggagacctgccacagcgtgggggcagcctacctggagagcctgccgctgcaggatgccagcccggccgggggcccctcgtcccccagggaccttcctgagccccgggtgtccacggagcacaccaataacaagattgagaaaatctacatcatgaaggctgacaccgtgatcgtggggaccgtgaaggctgagctgccggagggccggggcctggcggggccagcagagcccgagttggaggaggagctggaggcggaccataccccccactaccccgagcaggagacagaaccgcctctgggcagctgcagcgatgtcatgctctcagtggaagaggaagggaaagaagaccccttgcccacagctgcctctggaaagtgaggcctgggctgggctggggctaggagggcagcagggtggcctctgggaggccaggatggcactgttggcaccgaggttgggggcagaggcccatctggcctgaactgaggctccagcatctagtggtggaccggccggtcactgcaggggtctggtggtctctgcttgcatccccaacttagctgtcccctgacccagagcctaggggatccggggcttgtacagaagagacagtccaaggggactggatcccagcagtgatgttggttgaggcagcaaacagatggcaggatgggcactgccgagaacagcattggtcccagagccctgggcatcagaccttaaccaccaggcccacagcccagcgagggagaggtcgtgaggccagctcccggggcccctgtaaccctactctcctctctccctggacctcagaggtgacacccattgggcccttccggcatgcccccagttactgtaaatgtggcccccagtgggcatggagccagtgcctgtggttgtttctccagagtcaaaagggaagtcgagggatggggcgtcgtcagctggcactgtctctgctgcagcggccacactgtactctgcactggtgtgagggcccctgcctggactgtgggaccctcctggtgctgcccaccttccctgtcctgtagccccctcggtgggcccagggcctagggcccaggatcaagtcactcatctcagaatgtccccaccaatccccgccacagcaggcgcctcgggtcccagatgtctgcagccctcagcagctgcagaccgcccctcaccaacccagagaacctgctttactttgcccagggacttcctccccatgtgaacatggggaacttcgggccctgcctggagtccttgaccgctctctgtgggccccacccactctgtcctgggaaatgaagaagcatcttccttaggtctgccctgcttgcaaatccactagcaccgaccccaccacctggttccggctctgcacgctttggggtgtggatgtcgagaggcaccacggcctcacccaggcatctgctttactctggaccataggaaacaagaccgtttggaggtttcatcaggattttgggtttttcacatttcacgctaaggagtagtggccctgacttccggtcggctggccagctgactccctagggccttcagacgtgtatgcaaatgagtgatggataaggatgagtcttggagttgcgggcagcctggagactcgtggacttaccgcctggaggcaggcccgggaaggctgctgtttactcatcgggcagccacgtgctctctggaggaagtgatagtttctgaaaccgctcagatgttttggggaaagttggagaagccgtggccttgcgagaggtggttacaccagaacctggacattggccagaagaagcttaagtgggcagacactgtttgcccagtgtttgtgcaaggatggagtgggtgtctctgcatcacccacagccgcagctgtaaggcacgctggaaggcacacgcctgccaggcagggcagtctggcgcccatgatgggagggattgacatgtttcaacaaaataatgcacttcctta

SEQ ID NO: 1251 - protein, 595 aa, Homo sapiens
MRVLLAALGLLFLGALRAFPQDRPFEDTCHGNPSHYYDKAVRRCCYRCPMGLFPTQQCPQRPTDCRKQCEPDYYLDEADRCTACVTCSRDDLVEKTPCAWNSSRVCECRPGMFCSTSAVNSCARCFFHSVCPAGMIVKFPGTAQKNTVCEPASPGVSPACASPENCKEPSSGTIPQAKPTPVSPATSSASTMPVRGGTRLAQEAASKLTRAPDSPSSVGRPSSDPGLSPTQPCPEGSGDCRKQCEPDYYLDEAGRCTACVSCSRDDLVEKTPCAWNSSRTCECRPGMICATSATNSCARCVPYPICAAETVTKPQDMAEKDTTFEAPPLGTQPDCNPTPENGEAPASTSPTQSLLVDSQASKTLPIPTSAPVALSSTGKPVLDAGPVLFWVILVLVVVVGSSAFLLCHRRACRKRIRQKLHLCYPVQTSQPKLELVDSRPRRSSTQLRSGASVTEPVAEERGLMSQPLMETCHSVGAAYLESLPLQDASPAGGPSSPRDLPEPRVSTEHTNNKIEKIYIMKADTVIVGTVKAELPEGRGLAGPAEPELEEELEADHTPHYPEQETEPPLGSCSDVMLSVEEEGKEDPLPTAASGK

SEQ ID NO: 1252 - DNA, 62169 bp, Mus musculus
  misc_feature (1)...(62169): n = A,T,C or G
tggttttgttttgtttttaattcgcttccagtgtattaaaactgggctgagagagcattactcagtgtccttcagctattccagaattctccagctaagatgtttgtccttcagcctcttggtgttgaatgtaagaatggaaagcataaatatccctagaagtgaagtaaacatcttataagatctgttgaaaggaaatggcatatgttggtattctcggttgattggcaatgcatgtatagagtagctaatgtgcagagttagtacttgggcaataaaggggttaatttgactaaatcagtgagtactgagcactaaatcagtgagcactgagcactaaatcagtgagcactgagcactaaatcagtgagtacactgtttattataggcagaatcagggcatccttttctcgtgtccataagctgattttccacacaggatcattctctcactcaacccacagtccacctggggttccacttccaaagtcaagctataggagttgctcgaatttaaagcacacactagggatggactgggtgataggctcggaagtgggctcaaaggcaacgctagggttttaattactacaatgaggcgccaggtgtgcgcatggatgtgtgacagtgttctgctgcaaggtgatagatacagtgaggaagaacagacacctatgtccatcctacaggcttgaatcccagtacccattctctaccagtgactagtaagccagtctttctctcacagtagtctgggtcacatgtacagcctgtgttttgaactcgttatagatctgaatgagctaacatttataaagcttctgttctcaacatttttttttcttgtgggagtaatgggcttcccaaacttgggcctgggatgaatttcccttcctccgtctttctcagttcagcaagcaacctctctatcaacccgtctgctcacatcatcgctatcctccccactgcgcaagcccagatcacagcggctgcctctgacgctaaatatctcttttagcagcccgtcctagtagctacacccagggtttaatcttatctgccgctgctaacccatttcaaaacaccatcatctctggtctggatccaaatgccacagactcttaaatgatcttgctagctgcttctacttctggggtcctttctattgcttttcagcaagggctctaataaaattcaagcccgtaggtgtaactttcttatatatgtgtctgcttggcacccactgccaacacacagtcagcagcattcctgttcatacacacatgcacgcacctggagcctcactgtagcagctaaaatcccagagttacctttgaccacagatctgagcctatcgctcagcccctgcgcttttcttctggaatcctggcaccagggtcctctagttgccctttgacgctccttgaacatatctggcttactcctgccttaagtgagacctttcacctgctctgtctgtgttatgtggctacctcactttcagataataaccttccccatgagaccctcctcagtccgctaggcccatagcaatcttccaattccagatccatgccctgtttaattggtcttctggccccccagcactgttccacctgtgtaatggattacttaatgagtatgtctattccatgtctgcttctattagactgcaggactatttttagttcttggatacctgctacttataacagctcattgttgcgagctgacctgcggctcacaagaaacggggtacacccgggaggcagactggagctgaaagagagagaaatagacggtcgagagaaaaatggagctaagtcaaggttcctgatcaaagctcaaatgtaaatagtaaatgtgattataaaggggtggggggcattcccaccaatccattcttggtgcctggaaccagctgcaggtgtagtctctggaatatctcaggggcctctcagcaggtagcaacgtcttgaaagagaacagcaacaatagagccatctaggtaggaaggctccaccctaggtattctccttagtggcagcaaggtcaaagtctggatcagcctgcttcgaggctgggggaggctacatgtcataagttaaactctcaataaacatttaatgagtaagtggatgattgaggaaatataagaaaaaaaattgccgtgatgtatgatatttgacttagatttatggtctagtactcagcccaatgccaggaactaggtgttgagaaagggcttcctcctataggcattgcctggtgccagcctcatgctgcatattgtctaggtactgggggcataatgtacttgtgatagttgatgaaccaaggcaagcagtgtactgtcctagaggaggagagctgcaggggcaggatggaggagaggctccacccattcctggagacttgacccaggaggaggtatatgtgcagcaagcctgggaagggaaaagattacataaggagggcactcatgttcaaggagctcctgaagagtgagtctgggttcttgtgtcacagagaggagatgggccccgtcatttccttcctttccttcttccaacccctcctaccaccatcccaccccactctgtcccagattcatagcctctttcttcttcttcttcttcttcttcttcttcttcttcttcttcttcttcttnnnnnnnnnnnnnnnnnnnnnnnnnnnnnnnnnnnnnnnnnnnnnnnnnnnnnnnnnnnnnnnnnnnnnnnnnnnnnnnnnnnnnnnnnnnnnnnnnnnnnnnnnnnnnnnnnnnnnnnnnnnnnnnnnnnnnnnnnnnnnnnnnnnnnnnnnnnnnnnnnnnnnnnnnnnnnnnnnnnnnnnnnnnnnnnnnnnnnnnnnnnnnnnnnnacacacacacacacacacacacacaaatatatataagtacaacctgctgagatggtttagtgttccttgtatgtatgatttcaagctgatcgatttatattgtagagccaggtaggggttcctccctggggaaaattaacttgccctctcccagcagttattagctgcctgtagctttgtctaagggtagatccccatgagatttcttccttccatatctcgtctatcagtgttgtcgttgttcaggtcttgtttaggcggccatattgttacagtatcataagtatttgcttccctgtgatttctaagagacacaatttcataacagacttaacagcccttgggcttcataactacctttgaacctaccaaagattaaacaacaacaacaacaacaacaacaacaacaacaacaacaaggctaaacagaaagatataaaaaatgttaacaggaattgtgtatgggccattctagaagcacccccagatccacaagattgcttaaggctgtgtttgaacacccatctctttcgtctacataccttgcttgttatttacaccctaatgtagtaccctgtcttctctaagcctttcttaaagctgctcagacctactggcatccctctggtcagacatgtagctgctgctactatctgagctcacttttcaaacttgtgttggagggagtccctagcaaaggaattctacaaagcccaaagattcctttaatttcattgtacagaagaggaatgtgtgcttcagagcagactcatgctcttttggaaaggccaagccctcctacctggccacaaagcctatgcttttcactgtgtgtcccaagatcaaggcccctttatttctgtgctctcggcacctaacatagtggcttgcacatggtgggtcctcaatatctgtcaaataaatgaacaaatgaatcaaagctatcatgcactatgctttgtgtctcagtatgttaactgtgtcccaatacgtccataatcacaggactgtgtccattttaggtgtgtagctttctctcgtgtcagcctcacttttgtctgattagacatcgcatgtcaactatttctcaaaagaaaggcgtagggaaccagccccctagtcatatcgtagcagtatgctctgtttgaaagagatgagcagttgatgtagttttcttctctaagaatatatcaatctcagatatggtagctgggcatcttttagaaaaataaaatgcaaatggagagagctcacaaaccaagtgactgcagaagtcaaaggtggcaggcttcgttttggattcattttctgtgtttgttatatttatcagaaataggaacaaaaagcccaagtttcctcaactcactgaagattaataacaagaaatgaagacagcaaaaagagcaggtttactcatgtgaatgccaggaaatccagtctagatatcatgccacttggtacaatgttacaatgtttttggctggtgatatctttccaaggtaatcaggtaaccaataggacatggcatgctataatgaagatctgtctatgtatgtgtggatgcatgtgtatatgattatatacaagtaaatatgtatatatgtaaatgtgtgtcttatttgttcattaacataagaggaaaccagcgaaggaaaaagtcattttttatgtttaccagtttgctccatgtgtattgatcatatttattgtcaaaagcaaatacatagggctagatagaatagtgcttgaaagaatctgaatttcgtaccagatcctaccatgggtggctcacaacctcttttaacttcagcttcagagaatctaatgctctcttcttaacctccgggggctcttgaacacaccttgtacatataaacctacataggctcacacacatacagataaacaaaaagtgaacatgtctttgaaaaagttaacaatactcttttaaaagggatggttgggggagagagtgaggctcgttacacagtaattgtatttgaactttgcccttacagataacatgaaaagaaacaccgggcaaaggggtaaaagaaagtgggagaacagcacagggtcagagataagggaggcaaacttgaggcaaagtaggagcagcacttcatgctccattttcaaatctatagttcagatgtgacatgtgtaaccctccactcatcggaaagtctagataccgggagtaaactgggggagctgtgcatctattcgcctaacaggcacttaaggactttatgttaaatttcagaatacaaagaggaaaaaaaatcaactgttaccaaccacaccctaagcaaatactcggccttatgagaaggaagcctagaagacgttctgcaaagttgtgtttggtggctaggtagttcattcccaagcctgtgagatctgccttgtctcaggacatctgctggcatctgtagtgttcagccacgagagggtacaacttgaaggcctgctgtgacggttaatatcgactctggaatcatctaggagacatgtcattggcatgttttcggaagatttttctagattgagctagttgaagtagaaagactaatcataagtaaggataatatggataaatatcccaaccattctatcatttgggaaccctagtctaaataaaaagaatgtgaactgaacgatagttttcattgctctaagcttcctgaccaaagaccagctctctcatgctccctccatatcgcctctgccacggtggacaagactaatgttgagtttgacctgtgaagtcacggaaggataaatgtcctgggctcttataatcctgcagtcccattagaatcatggcagcaataacttgtgtcttttcactgttttttatctttcttttgtgctggaggatttaggagccatggtctattatttaaatctatccttgctcaaatttcagtttggtgtttacccagtgttaaggataacaggacttcatgacaactcccataattcttaggtctaagccctaaacttcatgtctcaaaaggcagctgtattagaagatagcccagttacctgtatagaataattaaactgagaccatggagggagggaaggctcaaatccatcacctggtggtttcatacaaactggaaattagatcgcagactgttacagacatacctgctcagcgaataaagacgaagagaagggcagactgaaagccgagtggacaggcctcagaacgagccacccatgcagaaaccttgatcctgaacatccagtagtgcaagacaatacatttcttttgcttaagacacccagtgtgtgtgatactgtgctatggcatctccaacagactggctgactgagcttagacctttgtccattttcttttgttgttgttgttttgttttgttttttgtttttgtctaggcagtgggtgtggttgcacaaacgggggtggggttgggggtggggcgggagggggcggggttcactaactggcctttctttgaacttttaaccatttaatgacaccctgaagacttgtctactccccagcctgactagtagtctccatcagtgttccaaacagttcctcacaggagtgttctctttctacttcatgaaagaagcaatcaggagacaacttccttgtcaaaacccccacccttgcatattctccacctctttttgtaaggagctggagcttcagcccacatccccaccgtgcctcagcttcctctccccatctcctgcatttgtcaagtgttactgtgtgagtcatcttgtcagcctccaaaagtcctgtgagaagtctggtctcagaacaggatgctgtttcctgactcccaggctattgttactttctcattgttgaggaaaaaatatccaacgtgacaactgaaaagaaggaaatttcactttggttcaggttttagaggatttggtccatggtctcttggcttcatggtttttttgtttgtttgtttgttttggttttttttggtttttgtttttggtttttcaagacagggtttctctgtgtagccctgactgtcctagaactcactttgtagaccaggctggcctcgaactcagaaatccgcctgcctctgcctcccgagtgctgggattaaaggcatgcgccaccacgcccggcaacttcatgcttttggtagagcattatatggcatagaggaatagttcacatcatgaccaaccagaaggcagagaactggacaggaagttgtcagggatagcacagtacagcatcaaagacttttaacgagtaacccaagtcctccatcttggcccatcctcctaaattcataaaccttctaaaatagttccccaacctgaggtccaagagttctaaaatcatgatcctatagagaattttacatatccacatcataatgcccagcatcttccaattgcatccttatttctctgttccttttgacactaagcaaacaaacaaacaaacaaacaaaatggctccctttttcaacacaactgcaccctaacttactaagagaaccttcaaaccttcacttgaacctgcctgctggactgtgtccttctcattccctgaaaatctgaaaatgttccctctcgagaacggaaagaagcgtttaagactttgctgttcttgcagaaaactggacttaggccctagcatccgcatcaggcagcttacagccatttacgacttcaattctgagggacctgatgccctattttggcccatatggccatcccacataagagcctacacatacatgtgcaaataatatgttttttttaattaattaattaattttttgttagttaagaacttctttctttttcatgagtcacccttccaagtttcctttgctgggattttcacacttttctgactcttacgtcaagaatgttccccaaggttttaaaacttctccattccatctgttacatagtctctctgtgacatgacgaccctctttacaaactgtgctgaaacttcatgtgccaggtcatttaaggtcactgatcttaaacaggttaaaacagaattctgtgctgataaaatggcctgacctggttcagtcttctctgctgtcagacctgatgaccccagtttaatgccttggacacacatggcagnnnnnnnnnnnnnnnnnnnnccccagtttaatgccttggacacacatggcagagagagagaaaggacccctcaaaggtgtccttggtcctccattcatgtcctgtggcatatattcacacacacacacacacacacacacacacacacacacacacacacagagagagagagagagacagagagagagagagagagagagagagagagagaaccaaagaactgcaggaacaaaaatgaaggtccagttaacaggcccagctcaaggggaggctccaaggcctgacattattactgatgctatggagtgcttacaaacaagggcctaacatgactgcctttcgaaaggcccaacaagcagctgaatgagtccgatgcagatatttacacccaatcaatgcacagaagctggtgacccctgtggttaaattagggaaaagctagaagaagctgaggaggagggcaaccctataagaacagcagtctcaactaacctggaccttcgagaccactcagacactgagccaccaaccaggcagcacacaccagctgatatgaggtccctaacacatatacagcagaagagtgctgggtctggactcagtcagagaagatgcacctaaccctctagatacttggggccccagggagtgaggaagtctggtggggtggggggtagggataggggtggggacatcctcttggagagggggtggggaaggaggaaggtgagggaatgtaccaggagggagatgaagtctggactgtaaaaaaagattaaagaatgtatttttaaaaaagaaaaagaaaacacaggaaaaaaaagaaagagagggagagaggcacacaaaatgaataagcaaaatgacagcaaacgtttaaaaaaaaatgaaatgcacagtctaaaaaagtcctcctgacatacggagctgcagagacttactctcctgctgccttcggaaggattctctgtcatcctgtagtatagctgcaatgctgctttcccgcatcttaaaacagaacaaggggctttcctgccccagctcttgcatccagtaccctctgcctgaaaagtgtcccgtgaaaatcctgtgtcatgatccattctgtgacaagtctctgtttaagcagaagagtgcggggtcttcttgggaaggagagccaggaagagcctttgtatttggggttcccatgtgggatgaagtattactgcacatgagatgggttgcgagcatcctatcaactctaaaatcctacctttgtcaaccccctagagtaagcagcaataacttacatttattgagtaatcggttgttatgtcttagggattatgctaaacacctaggaggtattaagccatctaatcaaagcaagctttgatgtaatgaatgtgaggctctgctcacatctatctagttcagagaggtaagtttatcttaacagcactttaccatctggggctgggtttgaactgatacctcctgagaagaggggcagagtaaagctgagactttaaagatacttgggcaggatttttatcaaagctcagaagtagaggtaagcaggccattcattgccaggcatttgggtgaacagagagagagagggagggaggagagggagagggagaataattttacacacacacatacacacacacctgagcataagtagcaaacatgtcaagtgtcaaggttgttggtcaggagtattctgaagctgttgtttgtgtaccagcagaggctaaagtgctgtcttctcttggagagagaggttctggtcagtttgctctggagtctggaagtaagcagttggagtgcctgttgacaacccaagagccttattagtccagtcacctccgtggaactttggagcaggagtagggggtgggaaaggaagcagataaaagcaagtgaaaaaaaggaggaggggcaggctctgacccagtcagccctgtgctctcttcctgcctagcctgggccagtcttcgggagcccaatggctaactatgaatttagccaggtgtctggggacagacctggctgccgcctctctaggaaagcccagatcggtctcggagtgggtctcctggtcctgatcgccttggtagtagggatcgtggtcatacttctgaggccgcgctcactcctggtgtggactggagagcctaccacgaagcacttttctgacatcttcctgggacgctgcctcatctacactcagatcctccggccggagatgaggtgagttggcttctgaggctcactctaggcacagtgcgcagcgggacaccggggaagcaggctgtgactcagctggagctctcgcggcgggggggaatcttccagattgtcccaaacaaagaatcttgtgttgtggatcagctggaagccgaagggcagtgctgagcggaaggtctcctgttcaagttaccagaacaccgcctgcacaatgcctcctccgttttggcagtgtctgtgatgggggcgccgatccttgctgagctctgcaaagatgctcgcttcccacagagggtcctgaactctgaaggaacccttagggctatctttggccacagccatgcttctgggacaaagattactctcaggcacaggaacttcacattgtcttttggcttgtggtttccatcagacaccgcccctgcccagaaagttaaggtcacaggcgacatttaactaggtggcttgctcagcttgctgtgggggtggaaggggccaggaggatttttgtgaattcaaggttaacaagggctgcacagcaacattgtaaattccaggacaagcttgggttacaaagagagacctgactcaaaataagttaattaattttaattaattacaacacaaagaaaacaaaaaacaagcccaaacagcatcctggtctttttttttttttgcacctgatcattaataaaaacaaaacaagacagactgtcaaaactgaaatattactcatcaggtaagcgaaatccacttggtgatcctgtgtagacccttgggaacatcatcttcattggtcaatagagtcagcccatagaaccccttccacccactacctgccccagagggaatgatttatgttgcttctccctggcatcattttaacgtagaactgatttctgaagtcaaacagaaagcccagcaggctgggaaggcacacgcagaaacccaacttcacattctgtcttcagatgcacacacttcccgggtgctcgaatgctcagtggtttgggtcctggtcttacttgaaaatgttggagtataaacactctcagggtcctgataaatattttgtttacagatgtttaaatgatattggttgttcagccattttgatagcttgtaaattttctgtgcttagcaaaccagatgcatggcactggcatgatgtgtgcttagcattaaccatgtggtgtagacggtaagcacttcttcaacctatccactcatgtgtatatgtgtgcattcagcaagaattaattatttgtgtttatcaaataataatcaatctaaaaataacaggattaactaataaaagtatatatatttactctgtgtgtgtacatgtgtgtgtgtgtgtgcacacacgctcgtaagtgcgtgagtgcctgttccacagtacacgtgcagaaatcatggaattcagttctttgcttccactctgtagcttctgggaatcaaattcagataattagaggtttggaagcaagcatccctacctgctagtctgtatcatttgcctaacatattactattgtgatgagcatcttttcagacatctcacacacacacacacacacacacacacacacacacacacacacacacactttatatgaatagattagtggcaggtacatctcatgtgtcaggcacttatgtcaggagctgaggtgcagctcagtgatagagctctggcctggtttacaaagtgccctgggttcaccctcagcatcgcagtagaggaatgagtggaacagaatcaaccaggacagaaggcaacgatacatagacggttgctattgatatctccattttatagataagaaaagggagtcaaaagctgaaccctgttgagccctgaagccagatcattggagctggaatcttggctctgttgcgacctcagaccccgccctcagtgtatctgcgctgtggtgtgttcccaccttgtaaaatgggaacgttaatggcagcactcggcatctagagtaaacgaagaggactaagatgaataatcttgtcatggtaaatgctcaaaatgttactgctgtgtaaatggagtgttgcagatacctctccacaatagcaaatataaaataagtacaggcgttcatgcattagaacattgttgtataattcagtcctccagtgctgaaagttacatcgtttcgaatcttgttcacctaacacttggtggtgatagggtctctcatattgctacacccaaatctaccttattttttatagcgtagatgtaaccatttccagtcatcaaaaatttaatttccaattttaaattacatatctctgttacatttaggggatgggaggattgccatagggcatgcatggaagttggttctttcttcccctatgtaggttctgggaatcaaactcaggtctttaggcttggcagcaatcacctttatttaaatgagacatcgtgctggcccattttctaatttttcaatcccattcattcattcattagatatttttgagcctctgctgggttccaggtgggtgatctggctactggtggcacaggaggggtagtgtcctgattcttgtccagctttcccttacagtaaacatcttcaacttataccttcatgtgtgcactggagcgttctgtatgacagactcccactgatagaatgagattgtacatgttttagttagggtttctattgctatgaagagataccacgagcacagcatatcttgtaaatgaaaatatttaattggggctgacttacagttcagaagttttagttcattatcatgatgatggcatacaggcagacatagtgatggagaaggagctgagagttctacatctggactgacatacaacaggaagacagacagacacttggcctgccttgagcatctaaaaaccacaaagcccactcacacacttcctccaataaggccacgcctactccaacaagaccacacctcctaatagtaccactctctatggacctttgggggccattttcactcaggtcaccacagtgcatattttgtttgagtggctttcaaattgcacatgtttctaaatcctctgtgaaatagttttattagttatttattaactctcatatcagtctacagggcccacttctccatgatatgaccattattaaatgtcttaaatctttttaaattatgagaaagatggaaagataacatataaccattccctgtttgccagcaagtcttctgtctggcttttgtccatttaaactttgttcagatcttcactctttctgttgagttaattacatatgtgattttgggttgttcatattctagataatatttatacacacagacacaaagtatctcacagctacatcactaaggcctccaccccaaggacacattttactgacaacaccctgagtttcattattatattggggctacttcttattttgatacccttactaagaagcaccgagaaagccagttttattttcaaacctagtgcactggaaatgtttactctctgttctgcactatgaatcaggaattctttcctctctgggtctgcactttctcttgcacagctagaaagcaaagaagcgaccctcagcttctgcactaagagtttgagccacagctttgggttcctagggggagttatgcatcttccctttggcagttgacaagagttacatcttacatcacttctgcaaggggctgtgtttcttccagcctccaatgaccacttcctgtgtgtccatcaagtcagcacgaacagtccctccttgaggcctttgttcttctgcctgacacccaggtctgtactgatgtcacaggggtctccacacaaattgaaatagcatgtgtgtgtgtgtgtgtgtgtgtaggtgttggaacaggtttgtgcactcattgatgctggcaatccaaaacagaaaacaaataagcaaacaaacaaacaaacaaacaaaactcaaaaccctgcagtctaagccaacatgcagctttagtctgaaggaagtgtgacaggattcccttccttcctggaactatagacttttccttaaggcttgaaacaatgcggcccactcacaattatggagggtgctggccttcctaccaggcctatgatctaatgttattttcatgtcctagaacatcttccagcatcaggtagatatttctgagcacatatctgtgtgctgttgcctcatgaagatgatactgccaacgactcatctgtttatatatatatatatattttttttttccgagacagggtttctctgtatagccctggctgtcctggaactcactttgtaaaccaggctggcctcaaactcagaaatcgcttgcctctgcctcccaagtgctgggattaaaggcgtttgccaccacacccagctaagatttttttttaatgctgaatcttgttgctgggtaccattttctaagtctctataacaaactactactgcccagttcagtaatttgcattgaggatcatctaggttgtgtgattctgcaattggacaggggtcgtttggaggccaacttgactccatgtcatctgggtctgccatcacccaggccatcgttcaacatgccatgctttcatgaatgacatcttggcttagcagagaagttgtgtgtctctttctctttgtattgcctctgcatggtcccctccacaaggtccttccctattagaccagggactcttcatggttttcacactctaatagtgcattcagctgggtcctcctaaaactttaggctcatgagggcttcacctctacaggtcaccaagccaaggccaactcagactcaacagctagagaaactctacttctcaatgggtgggaggcataagacattttgtgggtaccctcagctcttcatgttttgcatgggagcatccttgtttatgttcctacaagccttttgttataattgttctgttgcctctgttattgcccttaacaacttcccagaactagatttataatgaaaaaaaattgcatgcaatttatgttgctgagtttgaggatcattttatagtggtgtgatggtttatatagccttggaccagggagtggcaccatctgaaggtgtggccttgttggaataggtgtgacctggttagaatgggtgtgtcactgtgggtgtgggtataagatcctcaccctagttgcctggaagtcagtcttccactagcagcctttgcatgaagacatagaactctcagttcctcctgcaccatgcctgcctggatactgacatgctcccaccttgatgataatggactgaacctctgaacctgtaagccatccccaattaaatgttgttttttataagacttgccttggtcatggtgtttgttcacagcagtaaaaccgtaactaagacaagtggtatatatttagcactcagattaatgcttaaactataataagttctaaatatttagttgaatcacataaatagcatatgagcatatatatatatatgtatatataaaacaaataatgtaaacaaagccataataaatataccttcccaggattaccacatttaaatctatcaatctgtgtttaagttatttagactttgtgtgtgtgggggtggggtggtggtagtttctttataagctgtataattttgtggggggaggggcaaggatgcagttgctgtaaccaaggcaacttatgaaagaaagcaattaatttgggacttgtcttttttcttagttagggttgtgaagagacaatacaacgacagcaactcttacaaaggaaaggtttaattagggctgacttacaggttcagaggtttagtccatttagtcatggtgagaagcatagagacatggtgctagagcagcagctgacccacaggtagaagggggagggggctggcatggaattttggaacaacaatcctgaagacacacattttccaacaaggccacaccttcaacaaggctacacccccaatcctttccaaaaggttcatcaactggatcctaaggggtccatttgcatccaagccaccacagggatcacaggtttagaggcttagagtccatgatcatcatggtgaggttcatggtagcaggaatgtaggcatggtgctggagcagtagctgagagctcacatctttagacacaaccattaggtagagagaaaaagaacattggtaattgactaagtttttttttttttttaagttcttccaacaaggccacccatcttaatccttttcaaacagttctaccgaggaccaagtattcaaacatacaattctatggaggccattctcattcaaactaccacaaacttgcttaataggcaagattaactagccggtgagccttggggatctacctgtctctgccttcctagcccatgcatgccaccgtactaggatttttaacaggagttctggaaatagaactcgggtctttatgcttgcaaggtcagtactttaccagtggagccatcttctcaacactgcagatcttattatttattttttttaagatttatttatttattatgtatatagcattctgcatgcatatgtgtctgcaggccagaagagggcaccagatctcattatagatggttatgagccaccatgtggttgctgggaattgaactcagaacctctggaagaccagccagtgctcttaacctctgagccatctctccagcccttgcagatcttatttttaaaacttaccctcataaaactcatctgctggcctctcttttgctttctgtgctgggtgtcagggttaatttacactgtcaacttgatcgtatttaggattatttatagcataagtgagatgcacctttaactttcttttgcagaatttctaaagagctttaactaagaaggaagattaatctaaacacggggtgggggcaccaacctgtgagctgggatcctgggctagacaaaaattggggagggaggaaaaaacagtcatgtattggcattttccgtcctctcactgtacttcttggacagggtgacagattaagtcacttctgtcgccatgctttctccgtcatggtggattgtgagccaaaatagacccttcatttctttcttcctcccctcccccccttaaattggtttatatgaactgtgatggttaatattgactatcaacttgatagggtctggaatcacctaggagacaaatctctgggcatgtctatgaggaagttttcagattgggttcatcaaagtaggaagactcaacataagtgtgcatagtatcgttccaagaactttggttttggctgagtaaaaaggagaaatgcaggcaagtagccacattaatctctctctctctctctctctctctctctctctctcctgcttttgccaccttggcagactgtgactcaaactgtgagctataagaaagctttccctttaaatatggcttttgttcagtgttttcgaagggaaagaaacatcagttatttgttctcagtgacaagaacagctactaacatgtggggtttgaacctggggtcttggctgagccacactccctgtctcattcgaagatggatatcaagcttttccttgaagatgaaactcaactctcttaagttgaaccagcagcattaaatgtagaatactcctgaattaacgcccttgtttcctcagtcttgaaggctacatttacaagctatcttctgactaagacagccctagatatgctgagagacacacatccaagatttaccacagggtgtacaggatgtcagcacttacagtatctcttggctctgtgggaaagtgtgacactcaggactcagggtatgtgcagaggtagaagagggtctgagggtgagacagagatcaagccatgaaggaagatgggtctctagagagaggtctggttggtatgacttaagttccgtgactctcccatcttggtgaagatcagcttcctctatagatgatggggatttcagccatggatgtgagttacagatgctggaggtccagctgagagtacagagatataaacaagtatgtacatgaaagatctcttcatcccagccacaggagatgttgacagccagagaggaggggttctaattcacctcaccacccttagttaactcatatgctgttcatcatattctggtctctttgttgaaaaaaaaaaagctttttgaatggaacacacttatgttaatataaaggtggctggacccaaatgtaaatgatgaaagagtcagagaatagtctctattcttccgcttcacttctttctcacattggctggattttctgatccctttgttttcaggttacatgtttttaaaattctcctttgcttcttcctcttcaaactttctgggtattttaggaggtcaagtctgttcattttacttccttctgactcctactttgatagtctcagcattttacttgagacttgatgaaagcagaaaattcgtacagagagtaaagacttcccgatgttggatggaactggcaaaccagtgaactcaaataaacccgttccctttacataagatcatgtcaggcatttcatgatagtgacagaaaactgattaatcaggaacaaggatagaacaactgccagattcaacagcctggctcaccagaatttgaaaacatttttttccaagtctaagttttcataagctaagcgcacatagcacgtagacctacacatattggagatttatttattcatttgtgtcaggcttgaaagtgaccagatgaaatgtaactagaacagactcgaagcccgagagactagctttaaataattgtttatgaggatgtcagtaaagtgataaattcacttcaaaaatatttcgaggcacttgtatctgctggtactcaaaatgaatattagacttagatacattgacatgaactagttaacgttctatgaagagggcagtatgaagctgaaattttctgattgtgttgttattgcttagaaattatttgtatctctagcagacaaaaatgacacactatcctctaccttaaaaggttggagctataacctcagacgaaaaggaatgaaaaccatattctactgagtaaatttttttttgtaaatcttcccaacagtacctgccttagtctgttgctattcgtataataaagtacaagatgttggaaaatagatgaaggaaaaacaagtttagctcacaatttcagaagttcaagaaacttctggctccatcatagtatggcaggtggtagcaggatgctgagacctgtgaggagagcacttagacacaggaactaactcccaccttcagaataggactctgagagtgatgacaccttccattaggtcccaccattaaagatcctataacacccacctacatggtaggccaagcacaagcatggaaaacgttggggtatagacacagaccatatccaagctatgataacatctcagtatgacgctacacagaatgttgtctatggtgtgggtttaatttgggcccccttcaatgttttatgtattttgtaacatatttattcaggaatactatgtattcctatgtacctatagggagttgctcttaggaagcccaggactcccaggaaactgccaaaatttgtgtggttaattcttctaaaaaaaaaatcctgagttatttgcgtataatctttactttgtcattcatattttatatcttctctgtatttcttaaaatagataatatagcatacatgctacataaattgctattacatcatgtagtccagagaatgatagcaacttattctgaatattttcaatatgcagtggtttggactcacagatgtggcagccacatgcacaggggaccaactgtatgcctggcctcttgcaggtgggttctttcttaacagtgagcaaaacacacagaatccttctaatttcagcaacttgcattctctcaggccaaggaaaatatgaaacaaaacaagaacatatgctgtatagcaaatggtgggaagagctggggagaatgtggaagagggtttcaatcttcaattatgggagtaaaatgagaacaacttccctgcaaggtgacattttagtaatgtctagcctgtgtttgatcttccaggactttcctaaagacatattataactttggttagttctaatgtagagtcatattttacactgtaaagatgtatagtatgttttctttaacttattaccattttctctctatttacagatacctattagtatgtggaacagggtggctatttggcttaggattgcccaccgtctgatttggatggttacagtcttgtggtgctgtttatttttatgctttgatgagttgatttattactatgagatgtacgtgtatgatgtgtgtgagtgcccatgtacacggatacatacgtgtcatggcgcacgtgcagaggtcagttttcttctctgaccttcatgcggggtccatggaacagactcaggttgccaggcttggacagacagtgcctgacctgctgcttcctctcgctggcctctgtgctgctgtttaacatgctcctacagaagcagtgttccctagaaactgacagcctggttacagtagactagacttggggatggagcagggatacctcacagggggagctattcttccagcattacatcaaacgccccataatgtcacatggtcccacaacttgaaggttattagagttgagcactgcgtgcttgggacatctgttgttaagttccgcagtgacatttcatcccactagtttagcagcagttgatgatcctggacagcccttcttttttctttttctttttctttttcttttttcttttttgtttttttgtttttgtttttttgtttttgagacagggtttctttgtgtagccctagctgtcctggaactcattctgtagaccccggctggcctcaaactcagaaatacgcctgcctctgcctcccacgtgctggggttaaaggcgtgcaccacccctgcaaggcttcaaatgcccctcttctctacccatccccatcatctactggctctgtttctgtgaagagctccgacaaacacatttgccacctgactgataaaggatcaagaactaatcaacttttcttttctgaactccctttcagggcaaccagtaaagaatcccaccctgcttaaagaattaaagtcaatacataccaaaggactctttcagttaaaaataatgatttgctaatttccatggcattgatcaatcccgttcaggatcatcaactgctgctaaactagtgggatgaaatgtcactgcggaacttaacaacagatgtcccaagcacgcagtgctcaactctaataaccttcaagttgtgggaccatgtgacattatggggcgtttgatgtaatgctggaagaatagctccccctgtgaggtatccctgctccatccccaagtctagtctactgtaaccaggctgtcagtttctagggaacactgcttctgtaggagcatgttaaacagcagcacagaggccagcgagaggaagcagcaggtcaggcactgtctgtccaagcctggcaacctgagtctgttctcaggaaatgagtttgtcacatgagtatggtgactggaagtctcttagagccagagtaggcaacgctatgacactcagtctaggaccaaactagaggatccggctggctgctcatataaggcctgactccagggccatgcagctgggacctctgatatgcaagattccgggatagcacactctcagggcaagaaccaatccccagtcccaaacttcccgagtaactgtcctgcctttgagatgagcctgcctattatcctggagaagcctaggttctgttggtagagaaaaagcctagagagtgtgtcagtgctactcactgcaagttgacatgatgtttctggacttgggtggatagttcttgagaactctatttttaatattttatgttttgaaatcatgtgtatatgagtgtacatttgtacacatgagtccagtgccctcggagaccagaaacaagtgtcggagctccctgaagctacagttacaagcagttgtgagctgctggacatgggtgctgggaactaagctcaagtcctccagaagagcagtccatgttcttaactgctaaatcacgagtctagccgctagaagacacaggcgtttaaaggaaagacggacacgttatgacttccatttataacttcaatccagagcaaaagtgcaaggccatactgtccttaaattatgtttgtacctaatttgtcttatactgagaactttgatgatgatgatataactatgtgttttctttgtcgctggatgtgtgatatgtaattgttatatatttgtttatgcttattattattattgttaatacattctattctaagtgatgtaagctttcttcaaggttctttttaccttcagagacaggattcatgccactagtggtgagtattgagaatgctatgtcctggcatggtgctatataattaaagagaagatcatgctggctgtctcactgaaaagggatagtagtaagacaaacactcaactaagaaagccacccagagcctcttcagttaatgtctcttcagtccgctgcagtgccatgctactcgccttaaaccaatcctgtcagattcatcaacctgttgtccgttccctgccttcatctcacttgatcaatcagattcactagaaagaactgacttcacatcttccctttgaaatattctcttcccttcatctctctacactggatgcttcctaatttatagcctcacccaaaactttagcacccccaggactgacacaacccaacttcctaatgaaaaaaaatccctacttggatggcagtggacattacaaaactcatctgttcaaatacaaatccctggtgtctttctcaatttgttccattccgttctttccttatttgaaacagcagttcattttccagtaactcaactaaaaaatcttggtatcacttctctcttcttcttttttttttctctttcacacttcatatgcagtcacacattaaatcaaatgtgttctactctcaaaatctatgcaggctggtgtgggtgcacgtgaccatcccacattaagaaacaggaagatcgtggtttaaggtcatcctgggttatttggtgagtttgtcccccatctcaaatgtacccagagtctgtccacttcttaccacatctgccactatccaagtcacagtcatctttcatctgagttttttttctgggaagaacaaaattgggtaacagctgatataatatgcaaaatggaagaaatggacggggtgggattggaggggcagagccttttaagtaggcctgagaaatcaggcctccattacaattagcatctcaatatcaaatgtagcatttttcaacagtctcacacatagtcattaattatcaaaatgatcacttaatttccataagaaaagtagttctcattggtcacttacctaatttacttacctaacatttaagggaattatataactaatactactacgaagcataaacatttacaggaaggtagatactcatccaagtgggtgagagccaaagttcctgcctgtgtttcagatggtgtgtgaagacaacttcttttacagttgatagtgtatccacatgggaggaataaatataagcttgccctagattgctttctattgctagggtaaacactacagcccaaagcaacttggagaggaaaggatttattttgccaactctgtgtgaagtaggacacagttttctggtaaaaaatgactccagaactgattatctacggtgcttgttctttgagaagctacttagaatcaatcaggtcagaatatggaaacaatcagtcctctcaaaggagaagtggtgacaagaatagatttaaggtgttgagaaaaaaagaagccaaacaaaacaaaacaggaattggggtgaaagatgaagaatcgatctcctgtgcacatgtgctaggaagggtcagaaaggggaagatggctatattcatacactgatatgggtggaaataaagagaccattttaccgtaatgcccactctggagaaggccatgaagaaacaggagagtgacacctgaagtcagaaatatggagagtcacccaagcaagagaattccttttaatcactaattttcttccaacaatgaagagcaagtgtgtccaatatagaacacttgcttaaaatttaaaaatacaaaatgaaggaccaaataatccccagttagactcctgaactgtagacttaaatttttttttttaaatccacaaagttgaaagtgatcaacaagtgcaatctatacctgcttgaacaggcagctttggcattaagtagttttaagaacacagttaaagggctggcgagatggcttagaggttaagagcactgttcttctagaggttctgagtttaattcccagcaacgacatggtggctcacaaccatctgtaacggggtctgatgccctcttctggtgtgtctgacagctgtggtgtgttcatatacctaaaaataaattgatctttaaaaaaaccaaacaaacagaatacagttagaatattttgtaatggaaaaatttttgaattgctatggtgttttctccttctcaccagaatgtgtcagatgtggtgtacacaccgggagacagtgacctccatatattgtcctgatatgttttctgttgctatgataaacaccatgaccaaaaccaactcagagaccaaaagggaatatttgatcctccagctcacagtccattactgaaggaggcaggaattagcagagttacaccaaggcagaaaatgaagtggaaccgtcgaggaacgccgcttcctggtttgctccctcggcttgctctgctgtcttatgtagcctaggcttgcctgccaagggtggcgctggcaaccatgatctgggccctttcacatctaccagcaatcaagaaattgtcccacagatgtgcccatagagcagtctaatagacatagttccacacttaacctcccctcttccaggtatgtgtagcttgttgacaaaactatatgaccaagttgacaaaaactaaccagcacagtgatccaaaaatctattgaaattattagtctaatagcaggaaagactcaagatatacacttccgtgggtactaccctctccttggcactgttgaactaactctctctctctctctctctctctctctctctctctttctctctctctctctctcacacacacacacacacacacacacacacacgtctctctgtctctgctgtctctgtctctctttcactttcctttctcattatatctatcaaccaaatattaagaagtaatttctgtctttggcacttatatatgaaattcatagcaaaactgatcatcttggttcctgggagtaagctgaattacccatcagtgtatggaagttggtgaacactccttgggagttcttcaaggacagaggcagaaaacagatggtagagatttaaagtcacaaggggatgccgaggcttaggtaaggacagtagattgtatctggaaactgccttcttgctgtaaccctgttttcaaaggcattctggactgtaggggtctgaacacattcacagctgagaaccatgtactctgcacttgccaagttaccttttcctcattcttcatattccaaggggttcttctccatcctcatttccccaacctcaagcagtatcttttgtcagtctcttaagggtaagaaagttacataatggacatttaaagcacagtgagatgtccctgaacgttaggggcatctcttattgttcaataatacaatagagagaaatctgccatctgtgtcacagctttctttctgtgtttaaagaagtagccagttacagaaaaatggttacaaaaaacacctcccttaacttctttccccttttctcagagagtaatcctgccctttgtttctctcacagctttctagaagggttcccagcacaaggcagcatatgatcttgttttcaacgtcttttctcacttccctattcctccccagttaacagtggttgcttcgatgagcacagctgggtctcactttcacagtcaatggacccacagttaatacatttactgtcctctagattcacacccagggacatttgtggtgttttcatatttgcaatatttcctaagtaatgcttaagataaagtgtgtgtgtgtgtgtatatagaattctaagagcaaatttgctaagttaaaacatatattattttttattttgaaaaacccaaagccctatttctcttcacggggctgttctcttctcaacacagggaggattcctgtctcctcacaccctgcctctttcaggggcccctgtcttgctgttcagcactctggtaagagaaagtactggctccagctgttcttaatttgtgctccttgcacactttcactctgtggaattaactattctgccttttgttttttttcctggtgaagtatatcttacagtctggatggcatttatctatgtacaaatatgagccatagaatgtaccacagttgcttccactggcttcttagtttgctaaaactaaaacagacacttactaaacaccgcttcaacaatagaaatgtacttcctggcagtcctgaattctgggagtcaaaagtgaagatggctgcaggggtgacttctggaggctgtgaggaactctgttccatgcccttttaccagctcttgggatctttagacattcttgcatgggttcaaggagttctgttagtcttcatattatatattgtattctctctgtacatacatgtttgtctttatagccaacttttcctttctgtctctgtctctgtctctgtctccgtctctctgtgtgtgtatgcatatgtatgtgcatgtacctgtgaatgtctgtgtatgtattgtgtgtgtctgtttgtgctcgtgtccgtatgtgtgtgtgcatgtgctcgagagggcgtttgtgtctatatggccagagaacaacactggttgtctttctctcttgctcttcattttattgtgaagcaagggctctcactgaacctgggattttggctagactggctggccgctgagggctgtgggcttcatctctgctccccacattcagctgtgcctaacttttacgtgaatgctgaggacttgaactcaggtcctcaagctgacagcatgcactttacccactgagccgtctcctcagcctcagtctctcagccatatggaatgtggaactgtctcaatgacttcatataaagtcgatcatctacaaagatgggttttagcagtgtaaaaaattttcaagctaaagtataattacatcactttctttcctttcctcctttcccactaccatgatcttcctctaatattcatctccaattgacagcctctttggatgaattcacctcacccttgaatgagccccctaattgattacctaatacaaaatggtcattactgaaataatttagtcccaagccacactaaatgtgctcaacaggtatatataaagagagagagggagggagagagagagagagagagagagagagagaatattctgtgaatatcttatttccaaataagaatacaatcagagatagtggggtaaggtttgaacatcttggtgaggacgcagttcaacccaccacactgggtatgccaattaaatgttttggagctatattcaatagagctcaaaaaaagactttaagtgagagatgtataatatctatataatgagatacccagaagtgtggtgacttcagggttagcttagcggatcagtgagagtcaggctctttgtttctagtctttcatctcctggggcatcttttatcctcaagcctttgtcaaaaaatggctgcagcaattctaaccactgtgtgctcacataatcacatctcgagtaaaaaagatcaggaggactggcattcattttgggactcctctcattccataacaatgtctttccaggaatcctttcttcactcttctgcattctccttaaatttcgttggccggaagtggcctgcatggctaacccgaggcgtaaggaggtggttcaagaagtgtttgatattctgagatcttctgtggagacatgttatccaaacagagaagaggggtgaagacatttgtttggttagggccagctgtgctgggcatgtcacatgtggacacagcactgaaatgtactctccacacctgcagagtccagtctccttgcacgatctctccgagtgctctctggaccggtgacactggctttggctccatttccctgatcgcttaggccagctgatcatcttctatccattcactggtcattatgacttcttctgctttgcccgtcttactactgaacagtcttttttgtttatatgttcaacttcctattctcttgtcaataatatggttacaagcatgttctctcaatctgtgccttcattcttgactttatggaaccctttatcctgagaatctaaatgtcattgaaatttatattttctcttatgtgtgtgcctttgtgccttgcttgggaatgtatgtatatatatgacattatgaaaagaaggggtttaaaagctgtaactactacttttcatagccaagtcttttaactatctggaatgcgtccctgcgtatggtgaaactaggaaaatgattttatccccaccctcagctgtgtaatcagcaacatgaatgctatttattgaatatttgaccttaacctagggttagtaatgccacttccactgtccatttaagttccgattccagttcccatgtaagaaggtagatgtggttgcttgtgatctgctgtccatcagaagtcagaccgaggagtgggaaacagagcgtgggacaaataggttccacaggactctgctctggaatgccgggagtattacagctccttaaaagagggtaaagccgtacggcagtctgtgtggggcaggtagcaggggcagagagcccttgaaagcggcaggagtgctgatgtaagcctctgtgggcagcgagagcctagatgccagtccaagatccaataatatgatgaatgcttctggagagagagctcttcccaagtgttacagctcagtaaagacagccagtctcagatgatcctcggggaaaataacttgtgcattttcttccatgtggagagggactataagaagcttgggggagtgggacaggatttgagaggtgggcgtaaatgtttcctattggctcagtttgagacgttggtgatgctctcattgcatggggaaggactcctggtgctgcgttatgtgactgactgcccatcttcctctcagataggtgttgtgattatgtattccagagcaggttccgagacatggaggaagcagctctgctcccgctgtctcagatctcggagcatcgcggggtgtaagcacaccccaccgcaccagttcttacgcccttctgctggcacggcccacttgccctacagttgcatgtacccataccggagctgaggggagtagaatctggggttcactgaggtttgctggtcaaaagcttagctctatctagttcagtgagagatcctgtctcaaaggaataaagtacagagtgacagagtgggacacctctgtgtatgtacaaaagtgcactcatcagcacatgggtatgggtatacacttcacacacccatatgccacccttgcatatgcacacacacatacatacctaatttattataaaagttggtttctttttattactaagtcaactgtgtctgtatatgataatttgtttatccatttactggttgatggacatttggcttatattcacattttgaatatgatgaatgaaggtactctggacattaatgtataaattaatatatggtcatatagtttcatttggaaaggcgggggttatccagaaataaagaactggactaaatggcagatggatgcctgacttttggagaaaccacaaaactgttttgaatagtgctggagataatttgaaaggtaaggatatagttttaaagaataattttttggaagggatagacatggtttgagtatattgcccaagagcttgtcctcaaagcttagccctcattgtggtgacatagtgattggaaaacctttaggagacagggcctggtggaaaagaacaaagccattaggatacgatacacagaagagtgcccatctcctaccaagggttagttcctgaagtgaagttataaaaagaacaagactcagggttggcatgtagctgtgtctgtagaatgcttgcctaatatgtgctaagctgagggttgatctttagcacctcataaaacttgatgtggtggaatcccaaaatttgggagactgagacaggagaatcagaagttcaaaactgtcctcagctgcctaagtttacagccagcctgggctacatgaaagcttgcctcaaaagcaagaaaaaaagagaaaagagactttttctggacttgtttctcaggatgtgatctcttccacatagatcagatcaagttatactgtactggtgcagtatcagtgtattctataaatttgcattcgtgacattgggaatttttaagggaaaatgataaataggttttggagaacacaggaatttgaagagattacaaatgactgacacagaattgctaaacctcaactttttgatgcttctgatgtacacttttgggaaattttccaaccaaactgagggctgataaggaagcttggttattatcctaaaggaaaacatgctaagcgttgaactggccaagaaaaacgagggcacagaagatggatttggacctgccgcttcctccattgcatatttgtactatatttaagtgaaggcagtgttctcccaaatgaattttttcaagctacagtatttgacataaatggaagaaaagcagatcctccctacccatgccattacatgtggaaagcatgcagatcttggcacaacttccttcccaatacttcaaaggtcttgtctcagtctttctcttccttggggaaccaggaggatctgtcactgtagagcacttccttcagtgtaacatgttgtgttcacttagcatttgtcacaaccctcctttttgctttgtgctgttgtccatgtttcatcttccagtacttctaatgagctcatcaccatctctcctttgtccttgtcacaaccctattctgttacttcctttgggtgtcttacaggcatttcaagtccctattctaaatggaacccatggtcaaggtgacttctgctggaagcgcttttccagttgatggcctattcatccttctagttactgactctataatttctctaacaccatatattcacacatactcagtccactagaaatccacagtgaactcagaatctatcgccttttcttattttttcttttctcccctctgccttcttcctctccgtccttctttccttcctcctcctcttcctccttcttctctttgctcctccttcctctttcttcctcctcctcctccccttcctccatcctcttcttcttccttcttcttcctcctctttcctctctttcttcatttttcaagacagggtttctctgtgtagccctggctgtcccggaacttgctctgtagaccaggcacaccttacaggattaaaggtgtacaccaccattcttggctacttttttcctatcttgacttatatcttcccttcctcctccatggctcaaagtcggatctttgtgtcatgaatactgatctacctgcttttgtccctacttccttcagagtacagcctgcaaagaagggcattctgatatctcctatttcctgtgcacaaagtgttctgttgcctctaatgccacaatagataaaagtccatggtgaaggtcaaatttgcctttctttctttgtttccatcatctccttctcacttgctttgctccagccaaatggtttcttgttaacacatcagatgctagggccttctatccagaacattactccattggaagttactactctaaggctctgtctcccttcaattctttgttcaatgtcatctaatgtccccaccttatatactgttaaataccatttgctgtccacccctaaagctcttatcctagccatttctccctattttcacacaaaattgtaatattctagtatgttccacaactttcataggttttttttcttgttctcagttttaccctctgcacctaacacatggtagaatttaactaaacgtttttctttttctttttaaaaaatttttattagttattttatttatttacatttcaaatgttatccctcttccttttttcctctctaaaccacctctccctcctgcttctatgagggtactcccaacccaccaacccactcctgcctcactgccctagcattcccctttgctggagcatcaaggtttcataggaccaaaggcctctcctcctattgatgccagataagaccatcctctgctacatatgcaggtagagctctgggtccccccaggtgtactctttggttggtggtttagtccctggaagctctgggggatctggttagctggtattgttgctcttcctatggtgttgcaaacccttcagctccttccgtccttcccctaactccttcactggggaacctgtgctcagttggctgcaagcattgggaaggctctggcagagcctctcaggagacagctatatcaggttcctgtcagcaagcatcagcaatagtgtctgggtttgggggctgcatatgggatggatccccaggtggggcagtctcttggtggcctttccttctatctctgctccactctttgtccctgtatttcctttagacaagggcaattctgggttaaaatttttgagaagggtaggtggccccatctgtcaaccaggggccattcctcacctcttgatatggtctctacaggttctctctcccctttgttgggtatttcagctaatatcttccctgtcaggtcctgggagcctcttgctttcatggtgtctgggactttctgttggttacgcctagtttcctatctcccattgctacacacctttgttcaatttccagaccctctgtacatctcccccctcttctcccacacctgatcctgcccccctttcccctctcttactgtttttcaaatttgtgatttagctctttctagggacaccttcaacctcaagaattttcttatataaagaccctgcttagaaaatcctcatcgcttctttgcatctcactgatcacccatttctcccacaaggtggcagtctctactttaaatataggctgtagtggcctcaaattcaagactcaagctagtccctgcagagacagcttgacctggtagaccagctagctggaaagttcatagactgtgaatccttatcttaagagccagatgtgttgaaggaatggtaaaatttagggtttgggagccttccacaggagtggcacattataaaggtagaaatgtggttcttatgggagtggtggcagtgacattctaaaacccagtgaaagctgtcaatataaaaactgggtttacagacccagaaagacatatatagtatgtactggcttgtagggcatagttgtaaaataaagaataatcatgctacaatccacaaaactagagaggctaagtaataaggagggctcaaggggtgactcatgaatctccctgggaaggagaaatagaatagatatcaaaggtgagctggagatgggtaagtatgggaacaggattaggtcagggtgaagatgaagggagagggaacctggagagacaactgaaattggggtgcatttgggggggtgagatagaaacatagtacaatggaaactcccacaaatctacaagagtgaccctagacttctaataagggaagatatggaacctgaatcaatcatctcctgtaaccaggcaagacttccagtggagagattggaccaccaacccagcatttgacctacaattcttgcctacaagatgtgttgggtagaggtggcacagaaattgtagaagtggccaaccaatgattggtctagcttcagacctatgccatgagagggagcccagccctgacactgcctagagggccaaaacccgaaggctggatgaccaagagacagacataaccaggaaaaaagcaaaaaatgatattctatgatattctgctatacttgtatgaaggagagaggctccatccagtaagtagctatggaaacagatgcagaggctcacaacctaacattaggcagagctcagggaatcctgtagaagagggggaggaagattgtaagagtccgaggggacaaggacaccacaaaactaacagaatcaactaaccttggccagtaggagctcacagagactgaaccagtgatcagggagcctgcatgggtctaacctaggcccttggcatatagttatggttatatagcctgatcttcttgtgggactcctagcagtgggagcaggacttgtctatgacttttttttttttttttttgcaagctttggggacccttttcctcccactgggtcacctcatccagccttaatttgaggagaggtccttagtcttattgtaacttgatatgccatgtttggttgatgtctctgggaggcctgctctcttctgaagggaaatggaggagaagtggaagggggtggtggaaaggcctggaagaagaggagagaggggatataatatatgagagaaaatttaataataataacaactggatttaacaatcatatatatgtttcccctcattacaagaccttaccttttccttccctgatgatattattctagcatctaggcatgaccgttcagtactaatcttgaacatctcctgagacctagaatcatatgaatcacttttttttcttctagaagcaactctattagaaacataggtgcaaagtttggattttcctgtagggggcaacattgtctagcaaagacaacaacatctggcctgcaaggcagttctggagctagctagttggccttggacaaggctaagctgctctgagcttctttacttctaagtaagagacatagagtcctctgctggctggtgtgagcttttgatgtgagcatgagtcattggtatcttgggcagtgttccactcacaggaacattatggcacggtcacaactgtctgacctttcctctgttgctgttttctgcctttgctcacctggagtcagccaaccttgaaaaactcagaggaaagggaaggcatgagaggtagtgagtggtgggaacagaacaagtgaagctctgttggcaggagcagaggagtagaaaagaggatgcacgcgttgacctctagtcttgacatgtgggctaacttactctataccaaaaactgtaggactccattttggaaaacaaggaaaaaacctgccctcagactaagattcttcttcaccaggaaagtctttgtttcagcaagtcaagaggctaagaggggcttcttatgaaacttctgtccaatgcacatacttatgaaggcatctcaattgtcatgggcctttggattcttttgtatcccaagattgctcattaatgtctagaccagtggttctcaacttgtggtctcaatcccttttctggggaacaaccctttcacagaggtcccatatcagatgttctgcatatttgatatttatattatgattcatattaataacaaaattagttatgaagtagcaacaaattattttatagttggggatcaccataacacgagaaactgtattaaagggtcgtaaagggtcgcagcactaggaaggttgagaaccacctgctttagagcataacctaggaccactgggagcatcctataattgtgtgggttgggtttgttgctctctgtaagaaggaaacattcacagcaaaggttcgtggaggggggagttggcttggttttaagagtttaagggaaggttcaaggaagctggctttacttgaacagtgtcatggaatcaacaggatgagtctaattctctgatatgaaatcttgaaaaatttttctctaccgggctggaaacaagatgaaggcctaggtttggatagttaagatgcagcaatcacttcaatcagccaggtacaaggaaggattcggcatcatttcttcatgtttgtgatttctttttgttttgtttttgtctgtattcacattgcaatctaccattgctttatctgatgttggtgttgtgtcaaactgcttgtggtgaattgaagagacttcagatgaggatcgggtatgaggtcacattgtttgtgctctctgaatccagagctgtttgtccttcatctcccagcatctccacgaaaacccctgtccatttcctgtcctggggaggaggagctaaggcaactagctttgctaccagctctcttactctggagagagatgaaaagaacgaaagcagggaactgtctcagtctccttatcatctggatgctagggaccaaacaaaaccttatttctctaggcacttagcaggatgcccttgagtatattatacttatagcatcagttccagaaaatgtattcaaaatctgtaaagtatgacgttcagaaaattcaaacaaagtgaagaattctgggaaaagaaaatgaaatcttttttcttctggcaacacaaagaatcagatgactttagcttctgttctgatctaaaaagcatacaccttacgcaggaaagaaagggggaactcagggaccttagtagagtgcaccatctgtttttcattttgtttgagatctttcatttcctttctccttgaccttactggcaaagtctgggcctggcatccctctgtggtttgtgtgtgacttaacaaggacatattttaaagttggaaaagaaaagttcattgtaaaaggtctgtagtcctccttcctttcacatccttgggcttcaggatgagggatggacaccgaggacagaaacggtttatttgatagcatcctagacatgtaagacttatggcaacccccctggaaaatatgcaacagaggaatgagacagcctacatgcacattgactgatggtcagacaaagcgatactgttatacagtgaaatgttgttcagcctttaaaagggaggaaatttaatacatacgtggaggtttgaatgggaatgacccccacaggctcaaatatgtgaatttttggtttccagttgaactatttaggaatgactgggaagtgtggccttattggaggcgtgtccctgggagtgggttttaatgtttcaaaagtccatgccagactcagactcccccccacaaacacacccccaccacccgctccttgcagattagaatgtgcattcttagttactgctccagcgtgatgctctctgtcctctgagactctccctctgaaaccctaagcaagctcccaattaaaagctttcttctatcagctgctttggtcatgatgtaacctgatcatagcaggagcgaccctaattaagatgtaatatagctgggaacatcatgctaagtaaaattagccatttacaaagattccaggtttgtgagatgcctatcagattgaaggaaatagaaagaattgtggtagccagggactgggtaaaggaggggtggggtgttaatacggatgagttacaaacatcctgactatttacctggacacttaaacagagtcaagcagaaggtgcatctcagtggtagagcacttgcctagcatgtgtgatactgtatttagttcctagtactaaacaaaacaaaacaaaacaaaacaaaacaaaacaaaacaaaacaaaacaaaacaaaacaaaacaaaactacccagtactgttaggtgtcatagtcccaaaactcataaattctgttattataaccaaagtagagtttgcatcttgatgattgcaaactaaagacaagcacagctgagaaataagatcagagaaagagttgctgcaagcagcaggctcaagaagaaaagatagtagacacttttgaggcatgcttaggtaaaaattgtgaagcatatttttgcaggattacagtggtggatgagaacaattttgggggtgctcaccttgaatcataaagatggtaaccagtatcacttggcatgctcaactgtctttaaagaaagaaaagttttagctggaaaaaggaaaggatattttaaatgtcttactgtagaactttgcccctaaaagttagatcttaacattatttttaatttgttacaaggtaaaaaaaattcaaatacatagagaaatttaaaaagtattagaaaacaaaacaacaacaacaataacaacaataaacgaacaaaacaaaacattatttcctggagcagccaggaaaaagacacctaagtgcccagagctactcccctgagtgaatatgtgaagaacaggggaaagagggagaagagagagtacttagtggagagacagaagagaggagggtggagctgagcaaatcatgtactgtagagagaagtggaactggatagcagttagaaacaggcagacatgaggagccatggtgatgtctgagcccgggtgctaccaagggccgtgtctgcttctgtggcactgctccagccagagtctgtgctgatgtctgtggccagagttaacaccaaagaccatgaggatgtctctggcatgggctgccacttaaggccctgttgatgtccaagcactatacaaggctggctctgcctcttgcctaggcaccatgggagagctggctctggtgctggggatgctgaagagctggtcccagtaggatgagtgtgggagagctggccctgtgtccctcaccaaatgcagcactcagatccccacatctcttcccctgggcagcaccgtataactggtcgtggtaatgagagcaagggtgagtggccagagggcatgtgagcaggagagctggacctgcccctggcttggttaaagtaggagagttggtcccagtggtacatgtatgggagagctggtgagctgaccaactcagtttccacctaggcccagatccaggggtctgagttggcccaccagaacatccaccccatctatgaactgctggagcaaatgaagaggctggtcctgcagatcccgagctgtgggcactccatgacacagggtgacaacaggataactgagaagagttccagtgagggtccaatattgatgatgtgacaaaagctagaggctttgggaaagaccaatcaatgacttattgcaatgaacatttgcaaggaaagatgtgtggacaaatgcgtatactgtggtatgtgccatgacaggcggcaacttccacagcaagatttttatttaattcattttattttttgttcacttttgggtagggggaggctgccggactgaagggtaaaatgggtgggtttggaatgcatggtgtgaaattcacaaaggaccaataatttttttttaattttaaaaactgtacttataatgtatgcaagatgtttttgttattctctgcaaattaccaactcttccaagaatcaagtcttccaagtcatgttcagcagtactactccagtctcctctcctgagcagacagccctcctccagtgggtatcttgaatctttattacttcttgtactggaatataagacctaagagaagcatagaaataatttgtgaaggacgtgagtttcagcacttaaataagagtttgctgatgagaaggtctgctgtgtggcagggtctcagggcaggataactgctctttcccaccacgcttccagaagtggaaaatgttctctccttcttccatcttcttctgtttcaagtcctgcagatgctccaaaggaaagacgtagagatttttatgacggttgggacttagaacagagagttcttgagaaggccactgcattaattaccagaaagaaaacataaaccctggaagccgggaagccgccaaacgtctattttctcaattgcctgtgatggtactctataaattttgattgacactaaagtacatgatgtcatcacttttcctttttatgtatgtaaacggtacggaaggagagggccctaatggtttcctggcatcgttttcaaaggcaggtgctgatgaacttaagcttctcagtctagactctggaaagaaaccccatcaaacctttcacattttcatttgtatcccctgattctcaacccgaactagggtcagaactgcctggggtgggggtgggggtggggtggaagtgggaggtatgaatgccactgatgatcccgcccaacattaccaagcccacctgcagtaaccctacctacttaaagttttagtctgacacagagtaattggacatatttatgagtacaatgtggcatttggcctatgtatacactgtataaagaacagtgacagacagctctatcgcctcaggtgctcatgacttctctgtgttgggaacattcggtcctctctacttgctgttttgaaacattgcccttactgggggtactaaagaaccttaaggactttttttatacaaggtgtagtatgagacagaaaacgctggtgtcttcctattttcttcttaatgttattagatgcttgggtcattttaatttcacagagcctcagcctcaggtaattttcatctcacagggacattttacacagctaataggatggtgtcaagaactgactgcccctgggtatatgattccagatgaagggtatttcttgttgctatctatgttccaaaaatattttttaaactttttcaatgtctttctttttttcttttatttattttttttatatgttcctaagattgatatttattttacatgtagagttgttttgtctgtagatatgttcatgcaccatgtatgtgcagtgactgtggaagccagatggaggtgttagctctggaaactgaacacactgttgggagccaccgtgagccatctctccagactcttcaaaaatatttttaaaatctgttttccatctttcattttatagagatcagaactgccaggagatactgagtacattcaaaggagcatttgtttccaagaacccttgcaacatcacaagagaagactacgccccacttgttaaattggtcactcaaaccataccatgtaacaaggtaatgagggcgagtaattccttttaaaattgagaatgaaagtcagaggggagacatctgaggaccaatgttaggatgcagacagaaaggagaccttggcataggcatcatttgatatggctggtggggtcagattggtggtggtggggctttggagaactggtgtaccatcacagtttaggacatctggggaaggaagtaagagagagatggggacacagaggaaagacagaatctagcatcagttccatccacacaaacgagagtaacccaaatttttgtaattatggaactttcccctggcttctgctaataagaaaggagtaaaccacaacacaaggcgaagttccattagaagagcgattttcttacgtcttcttagctcttcagagctatcctctggaggcgcaaaccaggtaaagaggctttaaagtgaccagctggaatgtaaatagaaggcaacatggagtcagaggaacccagtgttcggtcctttgagtatactgggaaaggtctaccacaagttacaactcttacaaagcctgtgtttaaaagaaaatgtcacatgtccaaaactaagtgaagcccccaaacccactcacaattgtcagttctcatcctgtggttagtaagctggagatttccggggctgtttccccaggagcctcagtacagtgctctgaacagaggaggtctgtggtagacaatagcaaaactgaatttatattagtgcatgtcatttattctgatggtttctatagtttttatttataaaaggtatgtatgtatgtatgtatgtatgtatgtatgtatgtatgtattatgtactatgtattgtagtgctggggatggaacctagagcctcatgtgtgttagcactcaatctactgctgacccacatctctaactcttagatttatttttggacctactaaattgtggttttgttctttctcagactctcttttggagcaaatccaaacacctggcccatcaatatacttggatccagggaaagatgttcaccctggaggacaccctgctgggctacattgctgatgatctcaggtggtgtggagaccctagtacttctggtaaggatctgaaccacctaggatggctcagggtgagtgggaagggagctttgagctgcaagggaacttgaaaggtcaataggcatatactctaatgccatcagtgaccttagtgacaaactgggctctaacaaaacaaaaaaaaatcactgtcctcttgaaatacaagctttggggtttagggttgatcttcaagggatagatatacatataggggaaacatcaccataagaggggaagcaagagagagtgaaaaaagccaaggtcagtttttactcctttttgtgatcactaatctagtccaatgtcccaatctcccaagaaagtctttaatccattcatggattaaaaatccattcatgggggtaaattccctcatgagctcaactccatttagaggtcccatcaacaaaacacattgcaacagagaattcagcttaatgggaacattggtgacacacacactatcaagccacagtgctactttataaggctgttgaggtaagacatccccaaatccagtctctccctcactttccctctctacatccttcctgttctccccttttcctgcctcttccactttcctcttttccctcctccctctccactttcttctttctcttctgcacttttggcaagaaatctcctccttaacctttatatatgtatttacacacacacacacacacacacacacacacacacacgttatatattcttgaacataactctaagtcatttttttaaaaaaatttaaattaaaattatatatatttttatctgtacagagtaatattggatataaatagacatagtgaacggattgttatctgtgagctatttaacatggacaactttgggtaccatcttaaggtgatctctttctttccccttcatagccagtgatgatctatttgcctagagagccatctgtgcatctcccctcacactgccttttagcaccatcacaccctctccatcctgctgggaatgctataaggttttactggtcactctttaccctcctaggtcagtctccatctgacaccatagtttttctcagagtgaaaatgggatgatgtcgatctccctctagaacctaacaatctctcttttgactctaggctaatggtctaaagacctgacctctgtgtttcagatgcctcaccttctcattcccttctccatcctcttttctgatcaaagctcatcatggctctttgcctttgcaccgtgccataggcacaaggtgcccttctctttagagtctgtctgaagacagtgattcttcttcaaagtaaatttcaacgtgaatctgtctctgattatttgacttcactacatcacatgtcctatgaggcagggctcccacctgattcaaccctctatctccagaacctaaccttcagtaaatgtttatatatatatgtgtgtgtgtgtgtgtgtgtgtttatatatatatgtatatatatatgtatatatatatatatatgcaaataaccttgagaacagtgtcatagaaaccatgcttctactctatactttgcaccacactaagggctaaacctgttttggtagggttgactatagaaagcctgagatcacctgagcccccaaatttatggaggttgaaaaggaaactctccataaaagagaattgccaggaatcagaggactatctgggggaaagtgtcttcttcccgaaaaggcctggccttctccctaagtgttcctggactccaggggagtgagaggggccggtgtctttagggtgcacttttgttgccatttcccagaatggtgagtcaaaacccatcacagtgttcctgtctgggatctggacggggaggtaaagagttggaaggaaatcaggggacacttacttaaattgggttgagctgtgtccattctccagcctctgtcttggcacagatgctgttggaaagttctcctatggggattggacagccaagaacggagcccaaaggtacatttcctttccatttaactgttttctataaacaatgtgttttagatatgaactatgtctcttgcccacattggagtgaaaactgtcccaacaaccctattactatgttctggaaagtgatttcccaaaaggtaagtcccaaatagttaaattctagagttttcactgaagatactgttcagtccatgactggttgacttctggccctttgggtggggggtacagatgattttaggtgtaaaagtatgaaaggaaatcatgccagaagatttttctacacaacttcagaacacccaggaaggcttgggagctcaggggaagaaacctaacccagtgaggaggtaacactcactggctgtgtctaccaggatgctaggcttggcttagtcctgggacccaggtattgacttgatttctggaacagtcttaataattggcatttgtagaccacttgatgtgtgtccaactctttgcaggagttaagaactctagcctcacaacagccatatgaaacaccatcaatatcacgactacttgtaaaaatcttttttaaaatttgtttacctttatttttatatgaattggtgtttttgcctgcatgtctgtctatgtgagagtgtcagatcttggagttacaaactgccatatgggtattaggatttgaacccaggttctctggtagatctgtcagtgcctttaactgctgcactatatttccaacccccaaaaccaattttcttagacattctgatcagtttccttatttcatcttcaccaaatggaaattaacacatacctagtctagatagctattggtgcattcaaataaaatatcactagcttgttaagtaatggaacccacctacacaacaaatgtttattgaagacttactgcatgttttaaaaactcaaagacgctgtatatttttgtttgctcgcttttacagagaatgttttccatttgtgttatcactttgggatatgttttacagccacatcatctctgaaaccccctacagcagttcatgttttatataaactaaatgcttccttgtatcacatctcagccttggtaccaaggctaagatgctgagggtgattggaggcaccttggcttctgagacactgtgcacctgtaccttgttctaggatctctttgaggaagacaaacaaactagtccctctttttgacaataaggatggttcttcttacaggtttgaattcccagatcaccttgttgctaagttgtgtgaccttgaggccaacggtgccaatgcttactttgtgtcagaggacttgtgagaattctcctttatagggttcaggactcttctgggtcagtgcttaatgattaatcataaggagtaggacttggtccctctgtggttacacaagcaccactggacttcataataaagctctgaatctatctgtagtgtagaagtcacccgcagagtaaagtgcaggttccccaacaaagtacaaggccatctatgaactgaatattcaatatcgactgcaactttccccacaaactactgttctcctaaaccaagggccccttccagtcacagcttcaccagtggagtcctgaccgctctttgggacgtgggttctgtttgctatacagcactttcttggtctttcctagtgtccagtgcagagtatcttcttttctcctgtcatccttttcatccctggaattttactgagtaaaacatacctgtgtcatgcactaggtataaagcactgaaagttctagaagcacataggaatccaagctctttgttctcacaaagctcttcgtactgacggctaaaactgttcaacccgccataacaatgaaatgttgttaagtaatgtgcacagatgtcgtggaaggagacccacgtcccagaggtctgtctccaaaggaagctgaacagtactccgttcacatggtgacctccagtgcttagcagacctcccagctgaaagttggttgcatgaagaaataaaactccttgttcaaccatgttcttttattcaagcaccacactccctccttctttatgcctttctagagcctcaggatcactgcctcttacctgggcttccctttctacagtgttcccctaaattgtccaccttacttctgctaaataagatgtagcatctacagaacatgataccaagtgagtgctttcattcatgcaaattgccatggctgcattaagaattcatacaaagtaaattcttcctgtggcttagactattggatagattcaccattcttgtactagaactagggaggctattctctctccctctctagttagtactaagtactctttggatggaattgctgaagaataatgatgaacttccttttcttcctcctcttcttcctcttcctcctctttctcctcctcctcctcttcctcttcttccttctcttcttggttttggtctttgacagggtttctctgtatagctttggctgtcctggacatcactctgtagaccaggctactccaaactagcagagatccaaccacctgcctttgcctcccaagtgctgcaatcaaaggcatgtgtcaccactcagtctggctgacggacttcttttttaagtttgcagaagatgcctgtggtgtggtccaagtgatgctcaatgggtccctccgtgagccattttacaaaaacaggtactcatttcctttctttgtgcaagggttaattatcacagttaccatagtctcctgatggacatggcattcctagaaaggatgtactttccatgtttcatatcagtcctgaagtgctgagcttttaaaagggaaagcttatggattcgctcctttctgggtcaatgtttggtctggttcatctaagatcctccaaagttcctaaaggccattgcaggttcccagtcattgcccttgactttttgaggtctcacataattttcttagcttccttccccctgcattctatgctctcatttcatcgatactgtctaccctgcatctacccgtctccctgttagcatcctcaccatggctctctcctgtgtgaagagcaggaatcccacgtcattggaacatcagaaaccatgcagggctgtgatcctcctcctcctcttttggaagtgttgccagcaaagtcctgtagtgatataatggtgaagacaccagaggtccttatacatactatatgtgaccttgtgcaggcatctagcctctaggttgaggatgcatagaaagaaactgagataaagtgtgaacagtgctgcactccatgcctattgaaaattctctagtacatattagcttttttttttctttttcatttaatcctcagggctgagttggtccacactcaagccttccttctctggcctccttctcgccttagtttctatcatcatcatggtcttgttctctaatctttctctgatgagaatgcttctaaaaatgagagcacatattaattttcttcaggcactgtagataccctcaattaattgttcctttcttctgctttagtatttagtattataaagccacatttaccttttttccttcttctggacctttttttgggggtggggtggggggggctttgggtgaaagtgctggtgttcaaaatctcaccctctgatgttggagacccaagtccttgcctcaggatgggtagctgtccacactaacaagaaaggatctagaaagatgttgttgaatggacagtctctgtttctaactagctctctggtaatgctactctttgagcagcaagtatttttttaatgtatcagtcagcatcgatgtacagttaaaactcttatcttgaaaatctcataaccaagagtcatgttgaaagaggaacagtgggaagcaagggaggttctgttcaatcgtgcagggacaggaggtatggatgccctgcgctttggcttgaggtcagttatttacctcttctgtttcagcacctttggaagtgtggaagtctttagtttggacccaaataaggttcataaactacaggcctgggtgatgcacgacatcgaaggagcttccaggtatgttattgcttagtagcggagtgatgagaccatcactatgactcagcctgcagaaggaatccaaggtcacaggaacacactgggaatagactggcttagcaaatgaatggggcttacacacttggccctccttctagtctctaaattctgtctccacaaccgacagtgactgcttcacacctttgctcctggtgaccagagaagccccagagggggatgtctgcctcacctctactcagtgctgtttcaagaggcagtaagagagactcagagagtgtatgaaatatcttattatttgaatatttcttccctagtaacgcatgttcaagctcctccttaaatgagctgaagatgattgtgcagaaaaggaatatgatatttgcctgcgtggataactacaggtaactgatttcttgggaacaaaagagctgtgtgtgctgagagggctttagggatcctctcaggccttggtggtgctctcactggtctctgccctgccaccaaacctagcttgtttccctagccaatggcctaaatctggctggctgtcctccgttccctgcctccttgcctgccagccctaagtgatgtcttgacttagaagctgactgatgcccagagtacacatttctttcttgctttactgctgtatttcctatttcagaggagcagaaatatgttttgccagggcctttctcccaagttttaaaatcccttgactggctataaatttgcatgtgaaatctccttggttagattcagatgtaagtatctaatatttggcaaatttccacatgagagtctaacaagatttatcgttctagattaagagcaaaactgatataaataaattcttgaagaaaatttaccattagcctatgggcaggtatgttgtctttacagtcacctttatctttaaaatgtcaagaccccctcatagtttttaactatgttgtggccaatgatacaggcagggacatcttcctctacagagaagcacttttggagcttttcctatgaggaatagcttccaccaagactaaagcagagagaaaaggctttatgtacaagctaaggagagggaatatttttttttaatctcttcatgtcacctaccatcaaagacaggcttaaaagatggatggctcatttcccagatgacccaagcttccctccaatcagctctctgttctttggaaacttccaaaaaaaatgaagaaaacaaaacaaaacaaaacaaaacaacacaacaaacaaagacaaaaccaacaaaacccagaaactgtcaacatgcatcagttaagtgcaaaaacaaaagaaatgatcaactataacagaaactctctatgcagctgactaggctaattcactcacagatattttgtatcaaaaagaagtacaggaagactaggtgaaggttgagaaatgtagagcctgtggttttgttagctcacattttatgaaaatggcagtctttttaaattacaagttagatgttggggcccgccagcggcccacatgtctgggttctagctgggaggcatcttggaatctggaagagaagagggagctaggcggtgcgagagagaatggaaccaagacaacagtctaatcaaggttcaattttactattcccagacactgggttatgaagaaggggaaggggcccattcccgccaaactggagtttcagtttcaggtgaccacgtgatagctccggaacagctaggcggcaggtagtagcagtgggagtggcagaccgataaggtggcaggctccacccggaagctctcttcgtgctaacagtgaaaactgatcagccaggtttcaggctgaggggggaggttacagttagatacttacgtaaagcttgccttgtgtagggggagtgtggtcctctcacaatgtcgtccaaacctcttgaggaaggtccctgagttctttgctgtcaaatgctttcacccagaggtcaccaggaagcctctaatctgaggaaagaagaatactcaggagggaactgtgtgggcctggttccagtggccgtatctgctgtcatctgggcatcagctgttaaatacttgtgacacatctgagccagttgtttgtttttaacctccacatattactgttgtacactctctttggtatttatttctatggtcttacaagtgaactgcaactaacttggcacatgctttcaagtcatttactcctgggtcaggcctttctcagtgctgtctctgagctcagatggatgtggatgctcagtggttaatctttggttgctatgatgcgtctttcttcattgacaagttggaccatagtgacatcatctggtctctttcctcttaagattcttgtcacatttatatttatttatttatttatttatttatttatttatttatttattatgtgtgtgtgtgtgtgtgtgtgtgtgtgtgtgtgtgtgtgtgtatgtatgtatgtatgcacacatgtgtgcacataccatagccttcgtgtggacatcaaaggacaacttgtaggagtcagtgcttcgttcaagcacgtgaactctggggatcaaactctcaggtcactgggtacggcagtgagcacctttgccccatgacccatcttgccagccctcatccagtccctgacttcctttctttcttctctcccacaggcctgccaggtttcttcagtgtgtgaagaaccctgagcacccatcgtgtagacttaatacgtgaaggatctggatcttagatcacctgtagcctggactgagatgaaggggctcagaagcaacactggtggaaagctgaaactgtcagggagaagcctctactacagtgttaacaccagagatggaagaacttcccaattctctgtgtactaccaacattcaagaaaaattactccataaaccagagttaaacttctatattgttatattagtctaactttctcatgtggtgcttctgtattgtttatatattgcttacatccttttattcctcttttaatgatctctcttttctctctctctctctctctctctctctctcaatgaggctgagaatccaacctgagaactttcatacatggtggataagcctatataccactgagctaaatcctcagcacagctgataacatcatttttgctgaaaaatggccaatcaaacttcccattagacaaagaaagtcaaatgtcaagtatatcgaaatgaatgaccctttttttttttatgttttttcattcttcccacagatattcacatggtaaacctgaggtcatagggtcattatagggaaggtgctgtgtgggaactacccacgtgccctgtgctttaatctttaactcaacacgtccctgataactttgagcattcttttcttttcttttctttccttttcttttcttttcttttctttttcttttttttaaacagaagaaaatggagtttagagagataattgattttcctaaagtcacattcttaagatcatggttacatctagaattaaatcagttctgtcaaagtccacaacatatgatagtttttttcttttccgagcttttattgccaaattggtagtagcctgtgttgtcgtctagcaaatgctattgcattagattgaatataatagaatctgaaatgtgatctttatggaagatcacaaaactaattacttgcaccctctttctcttccacttcattcttggtgccttttataggcagtcaagagttaacatatatttgttgctaatattggcaatttatgttttctatcctttttttcttagatcagtcttgctcagaatcactggttttgttatgttgttgttgttgctattgttattgttcttgtctttttcaaagctcaaatctttaactttcctcatttatttatttaattgagctttagtctttatttttagaaacatagaaatttcttctagctatctggaatatcttcagttttttgaggcaaatgcttagaccattgatatttcagtctgttttctacacatgtactttaggattctaggtttctccctgagccctgctttcgatgtaacactgaatttctgtatgtctttactggttagttactttgatagtttgtatatgcttgacccagtgagtggcaggattagaaggtatggccttgctggaataggtgtgccactgtgggtgtagtcttaagacccttaccctagctgcctggaggccactattccactaacagccttcaaatgaaaatataaaactctcagctctgcctgtgccatgcctgcctggatgctgccatgctcccaccttgatgataatggactgaacctctgaacctgtaagccagccccaatttgttgtccttataaaagacttgctttggtcatggtatctgttcacagcagaaagaacctaactaagacagttaccattcagttcaaaataattcttgattttattgttatttagacatgtgatatttacttttcaacatctggagaattgtttaggttttttttgtgtgtgtgtctttagtaggtattaataaactaaattgagacaactccaaagtatttgcttggtttattgaaaatagcataaacagagccaggtgcttctgtattcatgttttgacaccagtttgtgattgttgaacaatatatcttatttctaaacttttaaaaagctacttaaagacattaacttgctcccttacaatatgttgatggttcagtccattaaatgcttactttgtaagtacgagtgcttggattcaattcccccaaaccatgtgacggttaggaggcagaagcaggtgaatctctgtgggtttgaagccagcctgacccaggacaaccagggccacacagaaagatgttatctccctcatacacacacctcaaataaaacagtaaacaacaacaaacaaacaaacaaacaagtaggtgagtggtgcaccattggaatctcaggaatgaagaagcaaagacaggttccctactcccttcctcacccccaggctaactgataagcccaggcctcagagaaaggctttttcaaactgtcaaggtagaaggtatctaacaaatgacagctgagtgtgttctgtagcctttctgtgcatgggcacacatatgaatctgtgcttgcctcccccttctcaaatatggtgttagactgtatgataaaaattgttaacctgtcacaaagccttgacaagttggggttgcattagttagaatatatattcaaaaagggtgggtagtacaccactggattctcagtaataaagaagcagagacaggtttcccactccctgtatgggggagtgagaattatatacataagaatatatatatatatatatatatatatatatatatatatatatatgtgtgtgtgtgtgtgtgtgtgtgtgtgtgtgtgtgtgtgtctaccaacagaagatccaagaatccagtagttgttcagttcatgaggctggatatctcagctagtcttcagtatatgccagaatctgaaagaagtaggcaggcttctacttccgggtcaaagccatggcggtggcaaattcaagtccagtcaatccagtggtcttcttcgatgtcagcattggcggccaggaagttggtcgcatgaagatcgagctctttgcagacgtggtgcctaagacggcagagaactttaggcaattctgcaccggagagttcagaaaagatggcgttccgataggatacaaaggaagcaccttccacagggtcataaaggatttcatgattcagggtggagattttgttaatggcgatggcactggagtcgccagtatttaccggggtccatttgcggatgaaaattttaaacttagacactctgctccaggcctgctttccatggcaaacagtggtcccagtacaaatggctgccagttctttatcacgtgttctaagtgtgattggctggatggaaagcatgtagtgtttggaaaaatcattgacggacttctagtgatgaggaagatcgagaatgttcccacaggccccaacaataagcccaaactgccagtggtgatctcacagtgtggggaaatgtaatctagacaagacggaactaggtcctctgctgttttggtgtgacattctctctcaagtctgacaagctggactggcctctgtgtttgcttccctgtctccacagtatgcgatccaggacctggaagtatcacaaatgagaaccaatcatcctgtttaaattttggactgtaaataaaggaatttttttaatgcaaaaaacaaaacaaaacaaaacaaaacaacaacaaaaaaaaagaagtaggctccaatgccagtggaaaaaatggacttgctaacaagagagagagagaaagagagagagagagagaacaagcaagcaaagaaagaacaagctttcttcttcagtgttgtttatataggctgccaacagaaggagtagcccagattaaaggtggatcttcccacctcaaaaatccagattagaagtgggttttctaacttgaaatgattaataatagtaataataataataataaccatcatcatcctccccacacagatgtgcccagccctttaggttttaattaattccagatgtagtcaagttgacaaccaagaatatccatgcagacctgttcctttctgtcttcctctggttgaagatcctgttcttttaagagcccacgtggctgtagccacagtggacacacagtggatagctctcactggtgtctggaccactaatgcatccttatagagaatttaagtcttgacttgacaaccctcttctgacagggattcagatcttccccagctttcaagtagcttccccttcaaaatgtcctcggagccagatccctgctggtccagcctgcaacctggagcttttgcataagacttcctcccttctaggaaggctggttgctagatttactaatgtccttgctccagaacatcttttggaggtggctgctgttccagaaactcctgggccttcacatccccttcttagatgaagtggacagaatcaaatcaacttgtaagatgtgcctaagattttttttttttttttttttttttttttttggttttttgagacagggtttctctgtatagccctggatgtcctggaactcactttgtagaccaggctggcctcaaactcagcaatctgcctgcctctgcctcccaagtgctgggattaaaggtgtgtgccatcaccgcctggcaaactaaaccaccaatcaaagaaaacacatggtggaacttgtggttctagttgtatatgtagcagaagatgacctagtcgatcatcaatgggaggagaggccctaggtcctgtgaaggttctatgacccagtataggggaatgccaggatcagaaatgggagtgggtgggttggggagcagggagaggggggaggggataggagattttcagaggggaaactaggaaaggggatagcatttgaaatataaataaagaaaatatcttttaaaaaatgtgcctaagatagaaatcaacttataagacattaccaggaaaattcctcagaggtcaactttcaggccagtggagaactcagaggaggcaaatcacaaggttttcacatgatgctgaagagggccctcagaagccccagaggtagcttggaggtgtagatgttccttcccccaccccatctccctttatcacagtggttctcatccttcctaatgctgtgaccttttaatatagttcctcatgttgtggtgaccctcaaccacaaaattacttcattgctctgtcacaactgtaactttgctactgttatgaatcataaggtaaatatccgatacgcagaatctgataagccacaggttgagaactgctgccttattatcatagcacactatccgaacttttctctctgtagtcctgactttgagcatctataccattggccctgctgccatttccagccctgagcacttgatggcctgtgtgtacaataggtagtccatactcctcttcttatgtgactgttacattactgttgcctcataaactttctacaccagctctccatctctgtcttctatcatagctactcaaacagtgtagaaataacctcagacctaatgtccttctaatttccttcggctcctccatttcctattgtgataatttttgactttacagtgtttgaagcacagtttcaaagagttctgaaaaggaggttgaatgcttgaaagtgtgtgtgggggggagtggtgtgtgtatctggcaatgtacagtaattacattaattgttgctagctggtaagcaaaactatcaaatttgaggaaaaaaaccatatttttccttcagctttgtctcagttactctctgttgttctttcattgtctgaaaacagcccaactcaagtctgcatgttctcagatgcaaaagacagcatcagcaacagacttcctcctcctcagtggcccgtttcttcctgaaacaaattcccatgtttataacatgtgtgtagggctggagagatgactcagccattaaaggctaggctcataaccaaaaatataacttgtgtgtcttgggaagactctgcttggctgactgttaaatgttaagaagaacatcattttgcttttgagtaatagtctttggaaatccaggttgtaactaatctgatgcatcaggaagacttttgaatagaggggaaaggtgacaggcacaaaggagtctcattctgcatgtggccagaagaaaaggaccatagatgccccactcatcacttactcttctctggtttttgaacagagcccagataggtctttaactcatcgtaatccccctgcctcagcctcctgagtgctggggttacaagcatgtacaatcaagccagctttccttcctctttggaatctacaccaccctctcagtttctaccatagctcatctccctccaaagagaactgaacgtgaaggccctgtgagcagtccagtggtttgtggcactagacagctgagccaacgcacgaggaagatgcaaatttgttagcttccagcaatttgcctatacctatctatacattcttcatgaagcagtacagcttatcaaaatgttatgcatggtaaactgggacatcaatgggattcggagacccctgcaaggtctgggatgcaaggtgcccagcaactgtcccacggccttgagatacattttagaggagctggatggcgatattttctgtctccaggagaccaaagtgagcagagatgcgctgacggagcccttggcttttgttgagggctataactcctatttcagcttcagtcacagccggagtggctatcctggtgtagctactttctgtaaggacagtgttacatccgtggctgctgaagaaagcctgagtggtcagtttgccaccctgaaccggcatgtcggttgctatggaaacatgaccgcgttcacccaagagcagctacaggctctggatatcgagggctgagctgtccttacacagcaaaaggtcttcacacaggaagagaaggagaagcctttgaccctgatcaatgtgtactgcctgtgtaccgatcctaggaacccggagtggctgatctttaagatgcatttctatcgcttgctgcaaatccgagcagaagcactcctggcagcccggcagtcatgtgataatcctggggggcatgaatatagcgtactgtcccattgaccactgtgatgctggcggtctggggtgctttgaagaagtcctgggtcgtaagaggatggatggcttgcttagtaacccggaataccaggctgggtcccatataggacctttcatggatagctatctctatttctatccaaaacaggagagggcctttacctgctggtcagtgatcagtagtgtccgcaatctcaactatggcacccgacttgactacatactgggatacaggactctaactatagacactttccaagatgccttcctgctccctgagatgatgggctctgaccactgccctgtggaagctgtcttgcatgtgtcctgtatgccagcaaagcagtgcccagctctgtgcacccattttctccccgagtttgcaggtacccagctcaagattcttggcttcctagtcccttgtgaacaagaacctatgtggtggcagccagtcctgcagcccagcaaacaagtccagctacagaaaaagagaaaagcccacaggcactcatccaggcctcgaaagcatcaaggtggtcccagaaaacaccagaaaaacctgatgagttattttcagccttctgttagcttttcccagacttttggtgtggaactacctaagctgcctctggtgggcactcttgtaactccaacaactctggaaggggatgtgatagccacaaagaaggataagcaggccaaggtttctgaggtcagaaatgaggaggaggcacagacctcattctggaaatctgtgctgagtgggccctcagccacgcccctctgcagaggccacagggagccatgtgtgatgtggattgtgaaaaaaacaggatccaacctgggccgccatttctttctttcgttctttttttttttttaagatttatttatttattatatataagtacactgtacctgtcttcagacaccccagaagagggagtcagatcttgttacggatggttgtgagccacgatgtggttgctgggatttgaactcaggaccttcagaagagcagtcagtgctcttaactgctgagccatctctccagcccctgggccgccatttctacacatgtgccaagccacagggtcctccaaatgacccctcatcaagctgcaacttcttcctgtggaccaagcccagatgaaccaactgaggcctaggaatgtctacctggccaccagggtctgaagccaggtctctatctcctaagttgccttctccctgaggcttcatttcttcctttcttcttccccttcctcttcccttcccctgccctagcttcccctgagacactcttcttctcacacttcttcctctttgtccacacaggaacaagctgcccaggaagttgtaatcttaaactcctgttgcctggaatgggcaatgcatttgttcttaagcaaagtctgtgcctttatttcagtgcttaaaaaaaaaaaataaaattcttgggtttgggaatcaatcacacaatgacatatctgttctctgtgaagaaaattcacctgtactcctcttaggatgtgatacagtgacataagaaaatgcatggttcttgctaagtgacacaaatgtgagacagcacttagaagcttgatgtaaagagtagacctatagagaagaggcctaccaataattacatctggcactccacacagcatcactgtcagccacctctgcggctacaacagaatgcaactttgagtgcacatacattttctaaatgctacttggattttatggattctctggggggaggggcaagaaacagatttgggagtcacccaggtaaaaatagcaccaccaggtacttcactgactggagaggtgaaagagtcttcgtttaccttctagataactggctacccttccttctatgctaaaacagtcatagctatttctgggaatagaatttacagaagtggatggcaggtgatgggtgggtcctgacgtttgctaactatatcattttcaaattcattgtgtaggcctgcctaaggtgaaagcctgatataaataactgcttagagcaggctctggttccctctttttaaaaatgggagtcacagtaacttgcactgccatggtcagcttttactgccaacttaacacagcctatagtatgtgatatatgcatacacacatacaatttagtacagttgtatgagagagaggagagtcttagttgaggagcttcctagatcgaattggcctgtgggtctatctgtgggggttgtcttggtcagtaattgatgcagaagggcctatcccactgtgagtagcaccattccctagccaggtggtcctaaactgaatagaaaactaacttaccataagcctgtctgtgagctagcaagcagtgtcctctgtgtttcctgtcacacttctttgcctatgaagtgtattccttgattgaaggtaatattgtatggaataagaagcaaaccgaccttcaagttcctgccttcagctcctgcctggacttccctcagtgacagactgtaacctggggttacaagctaaaatatacatctctttcccctaggttgtctttggtcagagcattttgtcacagcaacaaaacagaagctgtttaataatatatattaaaaagagcagagtacggaaggtagccagaagaacaagagtagcttaaagagccaggataatgtttgaactgtatttttaccctttccaagaaggtgacagcatagacgagcaaggcaaacattaaggcaaaaatttaaagagagagaaacgtgagctaaggagactcatgcacaggaaatctttattttaccttcactgcattttgatgtctagcggaacagagccaacactaagctgaatatcacataaaagaaacaaaatgcaaaaagcaaggcaaagcaaaacgaaaaccaagtgtctttaaaggcctaaggtactagactgtatctatagctgacagggcaacttgaacaacattaaacagcaatgatctttactaaagaagccgtgccatcacaacagcttctccagtgtttccctgactggctacagtgcggttctgtaaggtcttctgctggagttgcccagagactcctaagagcactgggagtgttctcaacatgttggtgaatggtgatttccttctcgatagacctgtcctggctttcccacaaagcatgtaaagggcttaaaggggaagcatcacagatgctctttagacctgggaaaacggctccatcatcaccagaaggctcctgctccaagcatgcctgctccaagtggaatcctctggacagaaaacccatagctccctccgagtgaacaattaggaagaaagaatatgatttcgtgtttcacctgaccacattttggctttaggcatcctgccaagaaatagagcaaattcttggttatcctaaaggtaaaatcaaagggtactcagagcttttctctagtgctctaggcaactagtttgggatagagacaaggacatgaaccttcccattccagactggatatggtgctgaaggtatgcagttacaactttaaggtagtctggagtgggtgggcagagaagacccacttcttgaggggaaaacatagtttcccaccgagtaacttttatgctcataatccttgaaagatcatttaaaatgagggaaatctcag

SEQ ID NO: 1253 - DNA, 1611 bp, Mus musculus
gagcccaatggctaactatgaatttagccaggtgtctggggacagacctggctgccgcctctctaggaaagcccagatcggtctcggagtgggtctcctggtcctgatcgccttggtagtagggatcgtggtcatacttctgaggccgcgctcactcctggtgtggactggagagcctaccacgaagcacttttctgacatcttcctgggacgctgcctcatctacactcagatcctccggccggagatgagagatcagaactgccaggagatactgagtacattcaaaggagcatttgtttccaagaacccttgcaacatcacaagagaagactacgccccacttgttaaattggtcactcaaaccataccatgtaacaagactctcttttggagcaaatccaaacacctggcccatcaatatacttggatccagggaaagatgttcaccctggaggacaccctgctgggctacattgctgatgatctcaggtggtgtggagaccctagtacttctgatatgaactatgtctcttgcccacattggagtgaaaactgtcccaacaaccctattactatgttctggaaagtgatttcccaaaagtttgcagaagatgcctgtggtgtggtccaagtgatgctcaatgggtccctccgtgagccattttacaaaaacagcacctttggaagtgtggaagtctttagtttggacccaaataaggttcataaactacaggcctgggtgatgcacgacatcgaaggagcttccagtaacgcatgttcaagctcctccttaaatgagctgaagatgattgtgcagaaaaggaatatgatatttgcctgcgtggataactacaggcctgccaggtttcttcagtgtgtgaagaaccctgagcacccatcgtgtagacttaatacgtgaaggatctggatcttagatcacctgtagcctggactgagatgaaggggctcagaagcaacactggtggaaagctgaaactgtcagggagaagcctctactacagtgttaacaccagagatggaagaacttcccaattctctgtgtactaccaacattcaagaaaaattactccataaaccagagttaaacttctatattgttatattagtctaactttctcatgtggtgcttctgtattgtttatatattgcttacatccttttattcctcttttaatgatctctcttttctctctctctctctctctctctctctctcaatgaggctgagaatccaacctgagaactttcatacatggtggataagcctatataccactgagctaaatcctcagcacagctgataacatcatttttgctgaaaaatggccaatcaaacttcccattagacaaagaaagtcaaatgtcaagtatatcgaaatgaatgaccctttttttttttatgttttttcattcttcccacagatattcacatggtaaacctgaggtcatagggtcattatagggaaggtgctgtgtgggaactacccacgtgccctgtgctttaatctttaactcaacacgtccctgataactttgagcattcttttcttttcttttctttccttttcttttcttttcttttctttt

SEQ ID NO: 1254 - protein, 306 aa, Mus musculus
SPMANYEFSQVSGDRPGCRLSRKAQIGLGVGLLVLIALVVGIVVILLRPRSLLVWTGEPTTKHFSDIFLGRCLIYTQILRPEMRDQNCQEILSTFKGAFVSKNPCNITREDYAPLVKLVTQTIPCNKTLFWSKSKHLAHQYTWIQGKMFTLEDTLLGYIADDLRWCGDPSTSDMNYVSCPHWSENCPNNPITMFWKVISQKFAEDACGVVQVMLNGSLREPFYKNSTFGSVEVFSLDPNKVHKLQAWVMHDIEGASSNACSSSSLNELKMIVQKRNMIFACVDNYRPARFLQCVKNPEHPSCRLNT

SEQ ID NO: 1255 - DNA, 90435 bp, Homo sapiens
gtatactgttaatgattgtctgcccatgtcctgctgaaataccatgagtgttgatggacagtatcttttttttttttttttttttttttgagacggagtctcactctgtcacccaggccggactgcggactgcagtggcgcaatctcggctcactgcaagctccgcttcccgggttcacgccattctcctgcctcagcctcccgagtagctgggactacaggcgcccgccaccgcgcccggctaatttttttttgtatttttagtagagatggggtttcacctcgttagccaggatggtctcgatctcctgacctcatgatccacccgcctcagcctcccaaagtgctgggattacaggcgtgagccaccgcgcccggccgatggacagtatctttaataaaactgaatacagtttggcttggggaaaaaaaagccctcctgacagctgccacagacccgtacccaagagcatgtttccagaagttcccactatggggcataaatcccctttgagaacagactgagtctgtcaactgtaagcctttattttcacatttacaatatgaaaatcatcacatgtttacatgatggcagtgttgtgagggtacagttcacaaaggacctgacactcaacgatgttagcaattattgttgaaagaaaaaaaaaaacaagaattatgtatgaattccagcatctcccttttctcccttcaacattgtgccttatttctcagcaaatgagccaacagatgcttgttgatagatggttttagccggtgaatccgatgaagaccttggatctgttggtgaatgtccagcctgttgtcactgagtttgaactgtgggagaaggagctgcttattctgcaggcgttgcttgagtgccaaccacatactgggcatggttctggtgctagggacagagaacttggtatttctggtgaacaaaggcaggcaacggccctgttggcatggagctgcccttctagtgggggaactgaagagaggaggctcccccatttctagaagctttcccagggaaattggctgctttttgcttgacatgtacactcacatgttcttgcagcaagcctgagccacagggagttacatgagatgctcaggctcaaagagctagtgggggtggagagctggtattggagtctgggctctggtggtttgggagaggacatatggcctggaaggagccacgtatacacagtgaagcagaaagaacagaatttctctctctctatatatatatgtatatatatgtttacaatatcaaataatattttttaatcatttttaaagctaacaaagattaggggaaaaaaaggcaagatactaccaaaatgttagtggtagttgggctacgagtgggagcatttttcttctttgctctatttccacttttaaaatgtagttttttgttttttttttaaagacaatctccctctgtcgcccaggctggagtgcagtggcacgatttcagttcactgcaacttccaccacctaggctcaagtgattctcctgcttcagcctcctgagtagctgtgattacaggtgtgtgccactgcgcctggctaacttttgtattttcagtagagacgtggtttcaccatgttggccaggctggtctcgaactcttgacctcaagtgatccgcccaccttggcctcccaaagtgctgggattacaggcgtaagccaccgggcatggctaaaatgtgattttttttttttacttgaatgattttaaaatgactaatgaagttgaccaaagaaagaagaacatgtgtgctttttattctagaaccaatgtttctactaaccagctgtgtggcctggagatagtcatgcctcttgtccccaggtgtccccaaatctgttgttctccccgccgttctgtttatatgctgttccctcctttttgcaaaccttgcttgcccttcaacagcctgctgtggtgtcactgtcttttcaaaggcttcctaaaaactactccgggccaggtgtggtggctcacgtctgtaatcccagaactttgggaggccgaggcgggtggatcacctgaggtcaggagttcatgaccagcctgggcaacatagtgaagccccgtctctactaaaaatacaaaaattagctgggcacagtggcacgtgcctcccagctactcgggaggctgaggcaggagaatcgcttgagcccgggaggcagaggttgcggtgagccgagattgcatcattgcactccagcctgggcaacagagtgagactccgtctcaaaacaaacaaacaaataaacaaacaccactccgattccttctgattccccctgtttgctacatcaccactgcaatattaatgcttatttgttgactacttgctaggggccagacattcagctctgttccctatacacattacctgattcaactctcaaaagaattcaatgacggccacagatatttttcagcctgttcgacagatgagaaacttgtccttcagagaagctttactatttgcccaaatagcaaagcccacccaggtctacctgaccaccaagtgctcttaagtgctgggctatacagggattcctcaaggctagtttatttctgtgccctcaatacttaacacagtacctggcccatggtgggtccttaatatttgttgaataaatgaatatcagaatatgccatttttcaagcctcagtgcagtgtaactatgcacaaataagtctgcaataatgatattaccatatgttgagtgtctagcgtgttctaggtgtgtacattaccaattaatccgcacttcaagctgatgagtagacattgcactgcacctattttacagatgagaaaatagaaattaaaaaatattggtaacttgccccaaatcatactacagcaacagggtgtggtaggaggatctgggtagttccttgtgcattatcttcttccccccaaatataccacagtgttagacgtttgtagccaagcttcttgcctgcagaaagataaaatgcaaaatgagaatattcacaaaccaagtgatgtagcagaagtaaggggctatagggttcctttaggttttattttctcaagtgtttattacatttcacagaaagagaaactaacatctgaaggtgccaaatccctggtgattaataatcagaaaggaagacaaaacaaacttgaaactgtaactgtgtgagtgtggaaaaacccacattctcagctaccgtcagtgagagggccaactggtaccagcctttggctggcaatatctttccaaattataagtgcttgtgtcttttgacccaggaagtccacttttaggagtgtatgtacttggacacctaaaaaatatgctgccacaagaacatttgttgtagcattctgtgctcatttatacaggtctagttaagtaaactctagcatactatacagtagaattctaggggtcatctaaaagaattgggtaagcaacctgtgctggtgtttaatgtcttcaacatacattagtatgtgaggaaagccaggtacacaacaggatatgtcctatgctataatttttatgaaacaatgaaggtctctctctctctctctctctctctgtatgctgcttgttcattaaaatgggaagaggggagttcagggaagaagaaagaattgttttctgaatctagccctttgatctatttgacatttattccacgtgtgtttatcatatttattgtcagaaacaaatagccttttcaaaggggtgtgttttgtggcaggactcagatgtttcatttcacaagctggaaaactataattcctaatggttcagtttcataaacagcaggtggcaaaccttcttgcatggtaactgattttgaaccttgcactataaggatcatgaaagaaagtacatgcccagaacaagagagcagaagaaaggagggaacacagcaaggtcagaaattaacagaaatgaatccagaggcaaaacccacatttctcagtcattcactaactggtttgttcaaccagcatttatagacatcagattgatcccagggtactaagagaataaatttcaattgctgccaacctagccttgtgcaaactcctggtctcctgaggaggggacacccagaagaaattctcagagtgtgcattcctgggctagggggtccagaccagagcctctgagatgggtattgtctcaggagatctgttggcatctatgttattcagcgagaagagtgtacaacaatttgcagatcgaacctagcttgggagctgagtggggttagaaaaggcttcctgaggatgtctcattgaagctgaaacatgaagggtcagtaggagtcagcagggtgagggcatggcatctgtgaagtcccagaggcagaggagagcttgggctggttggggacagagagaaggccagcaggagtggagaagcataggagttgttggggacagaggtgcgcacgcaccatggaggctggagaagcagacgtgggccaacagacaggctgcttgtcatgtccagagcaagaggggagggagtcagaattatgttgtaaaagttatatctttgaaaggggtgacttggaaaaaaaaccccaccaacctgactgtggtatagacaatacatggaggaaggcggaaagagtggaattgggagaatggtggggaagctcttcctgggtgagaaaggaggtgaactttctcttggactaagttagtggcactggagatgaagaaatggatatttaatgaataatttgcaggcagtaggaactgtcgttcatgtggatatgtggaacgagggagaggcaagagtcaaagactgggaaaattctagcttgagtaactgcaggagatgttggttcttttcactgaaatgcaaaagaccagaagaggagctggtttgacagagaaagattaacagtttagttttggacagaatgagtctgcattgcctatgaaagcactcaaatgcaaatgttgtcttttctaacaactctttggtcccttcaggacctcccagccatgagctctctcatcttttcgtgatctctcacccttcttttgcccccgcttcagtttctgtgggacttagatgttatggaccattattaaaatcccatccttgaggagagtggatggcctgaatccaggagtttgaaatcagcctgggcaacatggcgaaaccccatctctacaaaaaaaatccaataagttgtggtagtgcacatctgcagccccagctactcaggagactgaggcaggaggatcgcttgagcccaggaggttaaggctgcagtgagccacgggctcagcactgcatccagagcctgggtgacagagcaagagcctgtctcaaacaaaacaaaacaaaacaaaaacaaacaaacaaaaaccaaaaacaaaacaacccataaaaaccaaaaacaaaacccattcttgcttaaagtttctacttccctgacgtttttttctccgttatatttactggtgttaggggctgaatggtgtacaccccaaattcatatgttgaaatcctaaccctcagtaccttagaatgtggctgtatttgaagatagggtaatagcttcaaaaaggtaattaagttaaaatggggtaattaaagtgagctcaaattcactatgactggtgttcttataaaaacaggaaaattggacacagaggagttcaccgggaagaccacgtgcagacagagtgagaagacagccacttacaagccaaggagagaggcctcagaagaaatcagcctggtgacgccttgatcttggacttctagcctccagacctgtgagtcaatacatttctgttgcttaagccaccccattgtggcactttgttatggcaaccctagaacacaaatacacacagcaaaccccaaccctgtcaaatccaactctgctcactttcacccttctgtttaaacagtggggagtggctgggcaaaagaacgcaacctactaaccgaccttttaaaaaattcctgaccacttgatgataccctgagaacccacagtccatttgctctcctggtctccttccaggtctaccagcaccccaccaactctcagaagatgaccttttcttctcatttcactgagaagcagcagaaaagtacatccacatcatcatcaccaaatccatgaacctcccaacccccaaagctgtgttttccatctttcttctgtgaggtggtggagctcctacccacactctcacctgtgcttcggatacctctcaccaatatatgagtccaggagttcaagaccagcttgggcaacatggtgaaaccctgcctctacaaaaataaataaataaataactgcaaaaaattaaccaggcccatggtggtgcgtgcctgtagtcccagctactcgggagactgaggcaggatgatcgcttgagctcagcaggtcaagggaaattactggagcaattgccaattgtcgcctgcctactgggtcatcccagcatcctacaaacatactgtgataatctcaacttagaacaaaatattctctcctgactgcccagcatcctctagctatggctttatttctcgatttcattttacagaaaagctctccacacacacgcaaaccccagctaacttactgatatcacttatcttctcacatactctcctaaacctgctgtgggtgggctttgtcctcatctttcctctaaaatgattcctcttgtcactatcatcaataactttcagggcacccttcctcttgtctcagggatcatccttcccagttctctttgctgaagctctctcatctttctggcctctgtcacaggagtagcccatggctgagactctgaaactcttctgtttctgcacacactcttcacatgatcttatatatacactcttggctttaagaactgtccatatctaaggtctcccttattagtgtctccagcattaatcccttgcccaaactccagaagcttatacccaagtggctccttgatgcctcctgttgggggtctaatagacatctcaaacttagcacatcaaaaaccaaattcttgattcatgcctcttcccaagaccaaatctacttcacctcccgttttcccatcactgtagattgcagtgctttccttcctttggtcagttacacaaataaaaaatcttggcatcatctttgactcatctctttcttgcaaatgctacatccaattcatcagcaaatcctgctgctgctaccttcaaactctattcagaatccatctttttttttctttgccaccttcattactgctactacagccattgtaactgttctccatccttatcctcctacaatttattcttaataccaaagccagattgatcctttaaaataatatgccagatcaagtcatttggtgacttgtatgggtaaaaataaaatgcacacgaatgggttaaaaataaaatccaaaaacaggcacatagaccaatgaaacagaatagagatctcagaaataagactcacatctacaaccatctgatctttgacagacctgacaaaaacaagcaatggggaaaggattccctatttaataaatggtgctgggaaaactggctagctatacgcagaaaattgaaactggatcccttccttacacctttttcaaaaattaactcaagatggattaaagatttaaaatgtaaaacccaaaactataaaaaccctagaagaaaatctaggcaataccattcaggacataggcatgggcaaagatttcataatgaaaatgtcaaaagcaattccaacaaaagcgaaaatgacaaatgggatccaattaaactcaggaacttctgcacaccgaaagaaactataatcagggtgaacagacaacctacagcatgggagaacattttcaaaatctatccatctgacaaaggtctaatatccagaatctacaaggaacttaaactaatttataagaaataaacaaccccattaaaaagtgggcaaaggacatgaacagatatttctcaaaagaagacatttatatagccaacaaacatatgaaaaaaagctcaacatcattgatcattagaaaaatgcaaaccaaaaccacaatgaaatatcatctcatgccagtcagaatggtgatcattaaaaagtcaataaacaacagatgctggtgaggttgtggagaaataggaacacttacactgttgatgggagtgtaaattagttcaaccattgtggaagacagtatggggattcctcaaagatctagaaccagaaataccatttgacccagcaatctcattactgggtatatacccaaaggaatataaatcattctgttataaagatacatgcatgcatatgttcattgtagcactattcacaatagcaatgacatggaatcaacccaaatgcccatcaatgacagactggataaagacaatgtggtacatatacaccagggaatactgtgcagccacaaaaaggaacgagatcatgtcctttgcagggacatggatggagctggaagccattatcctcagcaaactaacacaggaacagaaaaccaagcactgcatgttctcacttataagtgggagctgaacaatgaacacagggaggggaacaacacacactggggcctgttggggagagtggagggagggagagcatcagaaagaatagctaaaacatgaggggcttaatacctaagcaatggattgataggtgcagcaaaccaccatggcacacatttacctatgtaacaactctgcacgtcctgtacatgtatcccagaacttaaaacaaaataaaaaagataaaaaataaataaaacacacagtccaaaaagtcatcctgtcttacagagctatgggtgatctggtctcctgctactttccgaacttctgttctgtttccctcaaccctctagcctaactacaattggcctccttgctgctctggaacaggccaagagcttttctgcctcagagtctttgcacctgccatttcctctgcttgggaaatgtttgccccaagggagttgggtgacttgatcgctcacattacttaggtctctgcttgaatgtcacagatgttctcttaataaagaagaggcaagaaaagccactttattatttattaaactcccgcatagagtgcagtattattactgtgtgccagaccctgcttcaaacacattccatggactataaaattgcatctctgagcagctcctagagctggtagtaacaacttacatttactgggtgattaccatgtgccaggtattgtgctaaacacgttgtagatattaactcacttaatcctcgtaacaatcccatgaagtaggtactgctactatcccggctttacatctgaagtacagagaggttaagtaacttgccccatgtcatccagcaagaactaaatttgaacccagagcttagccactgatgcctcttgagagaaggagtcagacttaagttgagtctttaaaggtggttgaccaggcatttgtcagagttaagaaagagaggtaggacatccttttccaggcagagggcattgtgtgcacacacgtatagaagcaggcagcccaccctcatgctttccaggaagcaaatgtggctcaggtgtaaagtgcccggttgatgaagggagttagcggagggagtataaggatgtactgtctgcccccttaggacacctgcagaggattaaggtggctgtttctccctggaggtggagtgggtgggtcactgcacaggagcctatagttgttggtcttttaaactcttattggtgtaaccagccacggaactctgaggcaaggggttgggggtgggaagggaaacagagaaaaggcaagtgaaacagaaggggaggtgcagtttcagaacccagccagcctctctcttgctgcctagcctcctgccggcctcatcttcgcccagccaaccccgcctggagccctatggccaactgcgagttcagcccggtgtccggggacaaaccctgctgccggctctctaggagagcccaactctgtcttggcgtcagtatcctggtcctgatcctcgtcgtggtgctcgcggtggtcgtcccgaggtggcgccagcagtggagcggtccgggcaccaccaagcgctttcccgagaccgtcctggcgcgatgcgtcaagtacactgaaattcatcctgagatgaggtgggttggcgactaaggcgcaccggtgggcactgcggggacagcagggccccgcgcgcagggaagccgcccggatcgcccggaaccgggcatcttccgtggcgggtcagccgagagcccgccgggtggtgctgagtagggagtcccgggctcggggctccgcgggccgcttgcaggagcagctggccttggcaccgagcgtgcccgcgggaggcgggggggggcgctgctcggtggctctgctgcgtagccggtgaacacttggcaccgatgcccgccttctgggcaaggtgccctgagcccagcccctcgccgggctgcagcccaccctcggcgcgctcagcccgcttcaccgcttcagggacggaatagaactcgcagatgcagggtgtcgctgacattttcaactttttctgcggtttccgcccgctgtctctgacccgaaagtgcccccggacggttacagaggacacttaagtggtttgcaaagcctgtggtaggggaggagggtgtagaagggccaaaccacggaacttagttttattcatttatataaagcagcactccgattctttttgcgcggcctgaaatgcatgtgaccagagaagtaattaacaaaacaatgtcaacttctaaaaccgagacattacttagatgataaggcgcagcaactcggtgaatctgtacaaaccttggaaaaaaaacacattagtctatgggaccttccagttttctcatgctcctttccagctactaacctctcctaaagggaacaaccactttttggatttgattcccaggcctcgctttcaccgggaaattatcgttgcttgtaaaacagaagaagccgggaaggcaggcagggggagctgctactttacactctgtgctttgggatagcaaaatcccgcatttaagcaatccgaggaaacgagcaaatagacctccctcgcctctccgagcacactcaacagttccggttgcaaaatgtttgcctcctgggcttcccagcgtcccgttagttgttctatttacacataattagatacttaatggagagagaaactagaagttgaggcgttcctccaggctgtattgtaaagtatgaagtgaaatccaaaatgaaatggtaatgttagaaagcaacctcattaaaaaaaaaaaaagtaacactggtcttgaagatctttcaatgtgagtacataaagatctatctcatttcttttgacagcccatagtatttcataaactagatgtaaccatttcctattgacaggaaattagcttgtttccaatttttcaatcccattcattcatccaacaagtatctgttgagcacccactatgttccagacagtgatctagctactgatgacacaagagtgaatgacgaagttctcactcatgaaattttcaccttagttgggagaaacatgatgcaatgaaaatcttcatacatacattgtgtgtacatatgggagtatttctgtaggatagatttctagtgatgaaactgctgagtaaaagggagaattatgcatattttaagttttgatttttccaaattccaggtattccatatatactccaaaatagttgtgccattttactctcccatcatcagtctatcagaggggatgctttcccacaatctcttgaatgctgaatattttcaacttttttacttaagagaaaaaagagcatctaattgttccctcagtatcagtgagtctaagcatcttgtatatgtttatttgccatttatatttttttctgtgattttcctgtccagatacttgatactttctattgagctgcttatttatttcttatgggagatttttatatattttagataatattctctctctcacacacacacgcgcacacacacacacacacacacacacacacacacatacagtcttacagccacatccctgaaatcttgaccttgtgaacatgttttactggcagcactctggactcgatcattgccttgagactatttcttttttgatattctttggaaagactaacaatgacagttttattttcaaacccaacaaatcctggcatggaaatgtttgctcttgattctgcttttaaaaaaataaagaattattttctctctttctttctgcaccttatcagaaacagctaaaagaagtgagttgggccaggcactgtggctcacacctgtaatcccagcactttgggaggcccaggcaggtggatcacttaaggtcaggagtacaagacctgcctggccaacatgctgaaactccgtctctactaaaaatacaaaattagccgggtgttgtggcgcgtgcctgtaatcccagctactctggagactgaggtgggagaatcgcttgaacccaggaggaggaggtagcactgaaccaagatccagcctggccaagagagtaagactccgtctcaaaaccaaaccaaaccaaaccaaaaaaagaagtgagttggcactttcaacattctgcctggaaatctccttaccaaacctataagatcattaggtatattttctgcactttgtattgtgacaggtgacagtgttaccaaactttttaccaggacataatagggtctgcctttcttctagttgctaacaatttcccccaagtccatcttgcctgcactaacagtctcctttagacctctcctctcctgcctgtcacacattcctagtactaatgctacagtatagtagtaagggtctccagagaaacaacatttatataacataatataaatacattaatagagagaaagagattttaagaaattggcttatatcattgtgaagtcgggcaagccccaaatctgctggacaggccagcagcctggagacccagggaagagttgatgttgcagctggagtccaaaggcagtctctggcagaattctcttttacttctgggaccttggtctttctcttaaggccttcaactgattggatgaggcccaccacattatgaagggtaacatgctttacaccgagtctcctgacttaaaatctaaaaaataccttcacatcacaactagatgtgtttgaccaaatatctggataccatgcctgggcgaattgccacttaaaattaatcatcacgtacatgttttaaggttttgttacacaagacctcacttccaagtatcactttctgttttggtcatcagttgctgcataataaacaaccaccctaaaatttagtgacttaaaacaacaatcatttattgtctgccatggttctgtggtttgactgggatcagctgagtggcctgtttcacttggtgtcagctgggggtgtaggcatctgcaacattgtcttggcaggaacatccaagatgtcccacttaacacgatggctcctgggctcagctgggctggtcaggcctcccttcctctctgtgttgccacacggcctctctctatccatgtggcctctccatatggtctctccctggtggaggtgaatttcttcaaggtttctaaactctcaaaagtggagcctggcaagcccactcaaagcttcagatccacaactggcacagcttcccttccacagattctataggttaaaacaatcaccggaccagcccagattcaaaagaaggagaaacaaactccacccctccatggaggaagtagcaaaaataatgtagacagtttttaccctttacatctggatttgttagcttttctgttttcattttcttctggtctttcttttgtccttctcttacacttattttattaccttttatcaattagcttttaagatgataaaaatctaatacatgcctcctggaatgtcttcttgagcctagggacttttgtttaatgatatatcttgaggacctagaatagtgcctgaaatacaatagtcattaaatatttagctgaattaaatgaatggtatataagccagggtattaaaaataacataaacaaagttgtaataaatatacttccccagtgaacgacctaataccattactccccaaaccctcaatttctgtcttgagcatagaaactgttaatttttcctttgtgtagtaggtccttagtatttctttagaggttgtagcactttatcttcctcactgttccttttccttggttgtccttttccaaacatctctcaacaatttctcccaagtccatcttgcctgcactaacagtctcctttagaactcccctctcctgcctgtcacacagtcttagtaatagtgccacagtatagtagtaagggtctccagagaaactcactttctgcaagttttttagtgtgggtaggtgagtattgaagcttgttcttggcgttaccaggttggttctttgagttgaaccaggggcattacatgcggaatattcctgaacagatcacctctggttctgctgtctcaagggccacacacaagagctgccttctgaccaagatgtctctgggcacatgagacctgaaatacacatggccaagactcaacaaagcgtttgctgactgtcagagctgacagcatctcggtactgtgggagggagcccagtgtctggtgatagtcaggacggacccaggtgatgtcaggggtggggtggggcctgcaggagggaatggagagccagcacctaggggaagctgggaatttaggaagatatccagagagtgtaacttcagttccactaatctcacctgggtgaaaaccagccctctccatggatgatggtgattgcaggtactgacgatagctgcagactgctggtggtctaggcaagcatgcagggatgggagcaggcatttctgagagctccccttatccctgccccaagacaaggtgggggccctgtggggaaggactattttattcacttctgcatctccagttgtctaacacattgcttatcacctaacagtctcttaatagaagcttgctatattgagctgccttgagtccacatcatgctggttgaacataagtagaaattgtgggagacttaatcagagaaaatctttcatctgtcttaccttacgttctaatgatcacttctgtgcccacaaggaccatcttttctgattcatgttcatgtcgatttcttttttatttaacttcctcttcaaaatttctggcaggatttcttgggagccaattctccatttttacttccccatgcctcccattttaatgactgtaggattttctcagggtctactcagcaaaacttgttagtacaacatgagcaaaacagcaaatttatgcaaacacttagcaaagacttagctgtctgcctaatgctagggtgagacatgggagattcacaaatgaagaaacacaagcattgatctccaggatcctgcagtgggaggtatgcggaggaccaacctgggaacagagcaacgcaacaccatgtgatctgtaatgaaaaagaggcctgtacacagccaagaggtcactgaggaaggagccattgcttctgtgcagttagtgctgcgctagattctgcagggatgtaagaaatgtacccctatcaaacaagaaagactatgtgaattgctgaatatgtgagtggagtaccagcacaatgccatggagatgcagacgtgccccatgtggtggggcagagtcaggaagcactttaagaaagaaatagcatttcaggtcttcctttaaaggtagaatttcaacaagagggtgctctggagagtgtgtgttaccctgctgagaaaatcctggcggtcaggtaagatgctactgccagggaagattggccaattgattgactaaacccttaaaggtttggggatcttggggaggattctgctggtgagagggtctggacttcctcttggtctgtccacacctggaccttctcagcacacaagagactatgagggtgaccattttgcacaggacagaattccagcatgtttttcccctggagtgatggaatgaccacctgctcaacatcagtgtcctcactgagaccatgagattcagtagagtgctggaaagcttcatgcttacctgtgtcttctcaatgcttagtgttatgattgaaggcttccttcagtcctaccttttgttctggggttctaagaatcttaggtgcaggcgaggcatggtggctcacacctgtaatcccagcattttgggaggctgacgtgggtggatgacgaggtcaggggattgagaccatcctggcaaacatggtgaaaccccgtctctactaaaaatacaaaaattagccgggtgtggttgcgtgcacctgtagtcccagctactcaggaggctgaggcaggagaatcgcttgaacctgggaggcggaggttgcagtgagctgagctcacgccactacactccagcctgggtgacagagcaagactctgtcttaaaaaaaaaaaaatctcaggtgcacctgagacagattgaatgtggaaggggaagtgaaacaggccttccaggtgtggggcctgggtgctgctatagttacaattggggaagtgagactataggtctcagttacctgtggaaggaagggtagagtggagtacttacgcaaattagctaattctgggagcttggggtgctaccagggtatcagggagaatacagccagggaatagaatcttcttgaagcaaaggctgtttggaagcccccagagtggatgaaaaggctcagtgggaaacaacagatatcaggagagggagaagaagatacctatttctataccttttggccttgtgttttgcttcagacactgttcccagcaaggtcagtggaacccactgctcaaaacacacacttgctccttgttctggtgtcataatagctctgcaagcagtggtggtgttcagcctggagaacgttccttttctttttttttttatcacaataaacactcatggcttctctgcttcttcctttcttctttgtcttaggactcttgaaaaacagctgccaaatgtcagtttagatattttggagggaaaaaagttgggaatcaatgtttacaggttgcctgcaatgtgctggaaactacatagttggttctttttaaactttctctgaatcctgtcaggaaagttccagcaatcacatcttagtgggtccggaattcgtgggttcttggtctcactaacttcaagaatgaagctgtggaccctcgtggtgagtgttacagttcttaaaggtggtgtgtccagagtttgttccttctggtgttggacatgttcggagtttcttccttctggtgggctcgtggtctcgctggcttcaggagtgaagctgcagaccttcacggtgagtgttacagctcttaaggcagcgcgtctggagttgttcgttcctcccatctggagttgttcgttcctcctggtgggttcatggtctcactgtgctcaggagttaagctgcagactttcgtggtgagtgttacagctcataaaagcactgtggacccaaagagtgagcagcagcaagatttattgcaaagagcaaaagaacaaagcttccccagtgtagaagtgtagaacgggacgccaatgggttgccagtgttggctccccccagcctgcttttattcccttatctggccccacccacatcctgctgattggttcattttacagagggctgattggtctgttttacagagagctgattggtccgttttgacagggtgctgattggtgcatttacaaaccttgagctagacacaaagtgctgattggtgtgtttacaaaccttgagctagacatagagtgctgattggtgtatttacaatcccttagctagacataaagattctctaagtccctagtagattagctagacacagagcactgattggtgcatttacaaaccttgagctagacacagggtgctgattggtgcgtttacaaaccttgagccagacacagagtgctgattggtgtatttacaatcccttagctagacataaatgttctccaagtccccactagactcagaagcccagctggcttcacctagccgattgtgcaccaagtcagcaggcggagctgcctgccagtcacctgctatgcacccgcactcctcagcccttggacggtggatgggacgccagggagcagggcgcggtgctcgtcggggaggctccagcggcacaggagcccacggcagggagggtggggggaggctcaggcatggtgggctacaggtcccaagccctgccccgcggggaggcagctgaggcccagcaagaattggagcgcagcgccagtgggccagcactgctgggggacttggcacaccctccacagctgctggcctgggtgctaagcccttcactgtccggggcctgctgcgctcgccggccgctcagagtgcggcctggggagcccacgcccacctggaactcgcgctggcccacgagcgcctctctctctacacctccgcgcaagcagagggagccgactccggcctgggccagcccagagagggtctcccacagtgcagctgtgggctgaagggctcctcaagcacggccagagtgggcgcgcagaggccggggggcactgagagcgagcgagggccaccagcacgttgtctcctctcattagggttggggaaatggaccctgagagagattaagtaatttggtgatattctatagtcactctggctatgtaatttatggagcctagtacagaatgaaaatgtggggctcatttttcaaaaagcaggaaacagcttttcctttcttccagggtctcttcctccacctgccatgctggtgtttggttgctatttaatgttgagccctcttgggcacagggatacttgcagggacagggtgtctgctcatttttctgtagacctcaaaggtgagtcctgaggcttcagggtcactggcctccttttagggagtcacgacgccttgtctttgtacttcaggaatgattacgaatctttgtaggtaaagcggcagaatgccacgtcctctcctggttgccaggacgtgttccttgtggtttaattgccgggtctgccctgcagaccctggctgagcgacagatgaaaggagtactcagacacaggtacgcagtgaaagagcggctaggggactgccgaagagtcagcagtctcgataaactggagctgctcacttttattcagtacagacataatgccgaaagcctggagccaacgcaatctgtgggtaattaacattgttgttccgccgtgcagggagcagtctcgccagaggatgatgaaaggttggtttccggaagtaaacaagcttatttagacaaactcccctacattcccttgtacccactcctcgccctctgcgtcagggtaagagaacagctgccttcagcttattctcccccgaagctttgcagagccttctgacctttcaaaaggtcttcttctttccctatcggttctcccactactctgactgatctcctatatttgatctcaccttaacaatcacttcttagagctgggtcaggaagtatgcagcatgcacctggcactcctagtactgtgcccatgatgggcattgctgattgttcagagcatattggatgagcctggttcagcctcagaatcttccacccagtgcaccatggagatgctaccaattggttggagttgctctgagaggtgacatttccttgtgattctgcattagaaacatgttgtttgtcagccgaaacagggaaacctgacacgttatccgcccccaggaagatcccatcatcattccatgcaccttcagtcctgggagcttactttaaaaaaaagtgactgacatatgagcgcaggtccccaaacagaggggaggcaggatgagaagccagatgaagagagtcaaggtcctggggctgcttagcttggatgaatctgatgggaggtggggtgcatctgagtgttctctgctgatgaagaacagacttgttgcacgggggtaggtgtgtgctgtgtaaacacacatcagaatcaggaccccgaatagtgaataggcaagagtaacagctgaatttgcccagctcatcacaatttaacatcagttttcaaaaaggtaagagcgtggctttcatagcatgcagaatcaacacacatcaaagattgatttactcatttatgaaggaatcagcaaaatgacaaacttagttcagagaatattttgaggctctgagtagatataaaactggttaatgtttctcagggcaataaaaagctataaacgttggggatttcttttttatcagacagaaattatttgcatacttaacagaaaagatctccaagttaccatctaacttcataaggttcgaataaaacttcatagagttattaatgaatggtaaatagaaaagacaaatatatgttttaccagataattaagtaattcttggtaaacctggcaaacagtaccccagtgtgactctgaaaagacatgctgcccatctttttgccttatttccacgttttgggtatttttgtaagatatctattcaataaatatgtattgagctcctatgatgtcccagaaactcttttagatcctggagatatagcagtaaacaaaacaggtgaaattcttgctcacatggaacttatattctagtaggggagacagacattgaaacagaaaaatacatagtatggcagatggtggaaagtattaaaaagagtgctgtgtagtgtttacaacttactcatttatgaaggaatcagcaagatgataaactcagttcaaagaacatcttgaggcaccgagtacatttaaaagtggttagtttctcagggcgataaaaagccataaactttggggatttcttttttaggtatggaaacctaaagtaaagaagatgctatggtttgcacatttgtcccctccaaaactcatgtttgaaatgtaatcccagaagtggcaggatgagagattggccctttaggaggtgactgggtcatgagagatctgccctcatgaatggattaatccattcatggattactgattaatacgctaatgggttaatggatcaatgggttatccttggaatgaaatggcaggctttacaaggagaggaaaagggacttgagctagcatgctcaccctcctcaccgtgtgatgccctgtcctgcctcaggactctgcggagttctggtaagcaagaaggctgtcaccagatgtgtcccctaaaccttggactttttggcctccataactttaaggaataaattcatttttaaaataaattacccagcttcaggtattctgctataagcaacagaaaatgactaaaacaggaggctttactggaaggtgtcctcttagcaaagacctaaagaaagagggagagtgaaacatagaaatatctggggagaacatcctaggtaaaaggaacagcatgtgcaaaggccttgaaaagcagcaagccgctctccctctccctctccctctccctctccctctccccctccccctccccctccctctccctctccctccacggtctccttccacggtctccctctgatgccgagccaaagctggacggtactgctgccatctcggctcactgcaacctccctgcctgattctcctgcctcagcctgccgagtgcctgcgcacgccgccacgcctgactggttttcgtttttttttttttggtggagacggggttttgctgtgttggccgggctggtctccagctcctgaccgcgagtgatccgccggcctcggcctcccgaggtgccgggattgcggacggagtctcgttcactcggtgctcggtggtgcccaggctggagtgcagtggcgtgatctcggctcgctacaacctccacctcccagccgcctgccttggccccccaaagtgccgagattgcagcctctgcccggccgccaccctgtctgggaagtgaggagcgtctctgcctggccccccatcgtctgggatatgaggagcctctctgcctggctgcccagtctggagggtgaggagcgtctctgcccggccgccatcccatctaggaagcgaggagcgcctcttccccgccgccatcccatctaggaagtgaggagcgtctctgcccggccgcccatcgtctgagatgtggggagcacctctgccccgccgccctgtctgggatgtgaggagcgcctctgctggccgcaaccctgtctgggaggtgaggagcgtctctgcccggccgccccgtctgagaagtgaggaaaccctctgcctggcaaccgccccgtctgagaagtgaggagcccctccgtccggcagccaccccgtctgggaagtgaggagcgtctccgcccggcagccaccccgtccgggagggaggtgggggggggtcagccccccgcccggcagctgccccgtccgggaggtgaggggctcctctgcccggccgcccctactgggaagtgaggagcccctctgcccggccagccgccccgtccgggagggaggtgggggggtcagccccccgcccggccagccgcccagtccgggaggtgaggggcgcctctgcccggccgcccctactgggaagtgaggagcccctctgcccggccagccaccccgtccgggaggggggagggggggtcagccccctgcccggccagccgccccgtccgggagggaggtggtgggggtcagccccccgcccggccagccgccccgtccgggaggtgaggggcgcctctgcccggccgcccctactgggaagtgaggacccctgtgtccggccacccgctccgtccgggagggaggtgggggggggtcagccccccgcccggccagccgccccgtccgggagggaggtggggggatcagccccccgcccggccagccgccccgtccgggagggaggtggggggatcagccccccgcccggccagccgccccgtccgggaggtgaggggcgcctctgcccggccgcccctactgggaagtgaggatccctctgcccggccagccgccccatccgggagggaggtgggggggtcagccccccgcccggccagccgccctatccaggaggtgaggggcgcctctgcccggccgcccctactgggaagtgaggagcccctctgcctggccagctgccctgtccgggagggtggtgggggggttagccccccgcccggccagccgccccatccgggaggtgaggggcgcttctgcccggccgcccctactgggaagtgaggagcccctctgcccggccaggacccggtctgggaggtgtgcccagcggctcattggggatgggccatgatgacaatggcggttttgtggaatagaaaggcgggaagggtggggaaaaaattgagaaatcggatggttgccgggtctgtgtggatagaagtagacatgggagacttttcattttgttctgtactaagaaaaattcttctgccttgggatcctgttgatctgtgaccttatccccaaccctgtgctctctgaaacatgtgctgtgtccactcagggttaaatggattaagggcggtgcaagatgtgctttgttaaacagatgcttgaaggcagcatgctcgttaagagtcatcaccactccctaatctcaagtacccagggacacaaacactgcggaaggccgcagggtcctctgcctaggaaaaccagagacctttgttcacttgtttatctgctgaccttccctccactattgtcctatgaccctgccaaatccccctctgcgagaaacacccaagaatgatcaataaaaaaaaaataaaaaaaaaaaaaagaatgaatcaagaaaaaaaaagaaaagaaaagaaaagcagcaagccagccagtgtgtttggaatgttctcttatggaaaatttcaaagatatgtaaaactagggctaataatacaattaacccctacttacccattacccaacttcaacaactatcaacattctgctgttcttatttcatctatttacccattaaaaaaaaagtgtactttaaagcgaattccagagtttgtataattttgtctgtaaatctttcagtctgtatctctaaatctttcagtctgtaactctaaaaagaacattaaaaaacacaactatcataccatcatcctacctgacacaactgagtaatttttcatatcatccaatatcgatcagaagtttaattttccatgattttctttaaaatgtagttttataattgatttgttctaatcaagatttgcacattgcattaaaaatatatgtatcttaaatttcctttaatttacaaccatttccctcccccatttaagagtgcatattaatttattaaacagactgggcaattcatcttgtagaatttcccaccttctgggtttggccaattacatccttgtggtgttatttaaaatcctcctctattccctttattatctgttgactgacagcttggccaatcagaatcacttgaacgagctgattacaccccctctttctgaaacgttttcttcccttgagtctgtacacactgttggcttccaaatttatatctccaacccagacctctctccagtacttctgcttgctactgtgtttttcataactttctgatttttttagtatccaatgctagaaaatatatccattttgagaaagagacaaagtatgagctcatattgataatttcatttcaaagtaaagggaacaaagtttttatttaacatgttaattttatgcttgtttctcttttacactgaaaatcttagttctcaatgacattaatataattatgtatttacttcccatatatatgttgtatataattgttttatatatacatatgtgcatatatattattgctaatgaaacgtctactgaatgatgtaagttttctctgtgattcttttggtccttgggacacaggacttatcccactagtgatgtgtagtcaaaatactatgtaccagtgtttgataccttaattaaaggatctctctggctgctgcattgagaacagatggtagcaggacaaggacatcagcctggaagccatctggaagctctttagtgattcagataagatttgattttggcttggatggtgatggatgatgttgagaagtgggtggattctggatatgttttgaaagtaggttccatgtgatttgccatgggctaatatatggaatgtgagagaaaaagaagaaacaacaatgcttccaagattttggggcagaggtactgaaaaaatgaatttccatttatcagaaagagaaagactgtggtaaagcaagttgggaaggaaacagcagctcagttttccacattcagtaaccctcccttatctagggtttcactttctgcagtttcacttatccatggccagccacagtctgaaaatattaaatggaatattccagaattaaacaactcgtaagttttaaattgagcactcttctgagtagcgtgatgaaatctcatgatgtcctgctgtcttctgccctggatgtgaatcatccctttgtccagcatatccatgctgcatgttgtacctgcctgttacttgcctaagcaagtggatggctacttgcttagtgtccatctcagttatcagattgaaaaagcagtacatatacatagggtttagtactatctgcagtttcaggcatcactgagggggttggaacataaccctggcagataagggagactactgttttagtggagatgttgaccagaagactggttcatatgaatatgggggtcctggagagaggtctgggctggagatataaatttggaaatcaacagcgtatacagacacaaggaaagaaaacatttcagaaagagggggtataatcagcttgttcaagtgattctgattggccaagtaagatgaagattggaaattgaccaatggatcggtgacttggcaaggtcagtttgggaggagtggtagtgatgaaagcttatgtggaacaaattcaagaaaaaaacagaagagagaggaattagagattgttgtgcacagacaactcttgcaagaggttttgctggccaggggaacagaaatacaagtgaagtagtggctggatgttttccaaaacatgaaacttagttttcataggaaaaaaatggtttttctttttctacttattcaattttgtgcacaatttcattacattatataagtaaaaaccacaagcacgaacatgtttataaataggtaaataaataacaaagtagatagaaacaaaaattctcaggtgtgcaaaagagtagtttattagctgtgtagaagacagaaaacttgcttttatagagggaatgaatagtgttgattagtatagtgagtcagttaaataggtatcagttgaattttttgagacaataagtacatttagaattggctaggcattattcttccattaaaggaaactcttagtaatagattaggtcagaaaaccacaaagacagttttcttgaataagggggtggtgggaaaaaatggatgtaagatgctgagaaaaaacaggaaactcaacaatagatgaaatcaagaattagtttcgtgtgtgtgtgtgtgtgtatttcacagaaaagggctgaaaggggaggaatggttatattcacagatttttgtagttgatcttaatagggaataggagattacctttttttcagcaaaatattaccagcaaatgtctactctggaaatagaggataagaatcttctatttaaagaccaaaaaggtgaaaactgaggtcagaaatttaaagagtaaatgtagcaagatgctaacattcttgttccctctaataactcttcttttttaaaaattataaaagtaaaacatgcccattgaagaatatttggatgaatacaaaaatatagaaaagaatgtaaaatcgcttaagcccccaagtagaattctaaatagcggagaaacccacgatttaaaaaaataaataaggagatccacaaaaggaagatatatacctgcttaagtggacggcctcagcataagtagtcttacagttacaattaattttttttctattatacgatgttttaaaaaattgctaagctcagttgtctactccctgctagaatgtatcaaacatgctgcatccacatagtagacagttattctacatttttggtctttggatgttttgaagcaattagcaaagtttgatttgaagagacattataaatttccgacggcatatttttctctggccatgatccatatttgccttgatattgtccaaatgttcattttatcttatgactatcaagcaaatattataaagttatttgtgaatttggcacttcatagatgaaatattgtgaaattctgaataaaactgcttcattgattatcttggttcctaaaagagatagtttatgagttaaattatctctaacgttgtctaagttggcagtaattaaatctccatgggaattcttaataaaggcaaagaaggactgaaaacaccttgctgaaactgagagagatttaaaaccacaaaaaaaatgtaagatttagttagttgttcacgttttggggtcctgcttttatgtgttaatacttccagataaaattttttcaaaggtagttttgaaccccaggatctgaatatattaatttgtttatctctgaaaactgtatactttgtgtttcccaggtctggctttcttcatttttcctacttgagggaactccttttcttccttcaatatcctcatatcctccttcaatgtttctcagtcaatatctcctctcaatttttccatttaaaaattaaaaattaaattattaacattttaaatacactgaaatgttcatggaatagtagtacaaatacccatttacccaccacatggagttaatagacaataaaaatttgccatatttgttttacatcttttttctagtttttaaagaaataacatgttacaaataaaatcgaaatactctttccgccgattttcttttctcctgtctcagaggcaaatactgctacttgcttctcttgtatctttttagaaatattctctgcatatataagcatatatccatatatttttccacacatagtatctcttccgtgtcttagtttttttcattctacaatgtatcttgatgatcagtgtagctttgtttcattctaataattatatagattccactttacaaatttactatactttggacttgtatctatgaacgtttcgattgttttaaacctttggcaacattacagacaatgctgcaatgaaatccttctgtatgtatacatacgtggatgtgtgtataagatataattctggaagtagaattgctaagttaaagcatatgctacttaattttgaaaaaattgtcgaacttctcttcacaaggcaattatcttcttgaggtaatgagaactcctatttccccatacccatactacccagagtatcttcaaattttctgatttttgctggtctgataagggaacgttacctcagtttaatctttatttgcatttactatgtgtttttgccctgtagagtgaattttacttttctacctaacaatatatttttgtgattttaatgacattacttttgagatttacccatgctaatatataaactctggttctgcaattttaagtgctatatagtatcctattgaatgaccatactactcatttatttattattatctacttgttaattagtctgttatcttttttgtcagtttttgtgggcataaacaatgctaaagcatacatgtctacttgcgcatatgattttttcccagtgtgtttaatagaatgactaaggtagaatgactaaagttctgaggtgtggcaggtatgccatcttcacctttactgggtatgctagtgtgctgcagctgccgtgataaagtactacaagccgggtggcttcaacaatagcattgtactgtctcacagttctggaggctggaagtctaaaatcaaggtgtcagaagggtcggtgccttctgaaggtgtgagagagaatctgcttcgtgccctcttccaagcttctagtaacctcaggtgttccttgtcttgttgatggtgttgtcccagtgtcttcatattgtcttctctctgtttgtgtttgtgtttgtctctatgcccaaatttccccttttcataaggacccagtcgtatgggattagggcttaccctaatgatctcatcttaacttgatcatctgtaaaaccttatttccaaataaggtcattttctgaggtactgggtgttaggatttcaacatcgtttgggggggtaaaattcaatcaataacaacaggtataccagttaagatgtttttggctgcaactaacagaacattcaactgaaaaggtttaaaatatattgtaaattttaaacaaatgttttatagagatgagttctgactgtgttgcccaggctggtctcaaaatcctggcctcaagcaatccttccaccttggcctcccaaagtgctgggattacaggcatgagccacagagcctggccactttaaaatgttgttgacacacataacaagacatccagaagtggggtggtcataggatcggttcagcagcacagtgatggccgaggctctttccttccactcttccatctcccttgagtggctttcagcttcttgtcacaagattgctgcattatgtcctcatatacctggaacagagggcagggagaggggcaagagcacacccccatttcaagtctcttttcatcccaaagtaacatatttcccagcagccctctttcaaccctctctaggcttctccttaaatttcactggccagaattgggccacacggttacccaaaggtataaaagaggcttgagaagtgagaatttgatattttgaatcataataggagacatgctttgccaataggaaagaagggtaaaagaaatcttctggagagtacggaaccaacggcgtctgccacgttgcatatggccaaatggtcaccaaatttgttgtatcactttattttcacaaaattggtgtaaagtcctcattgctattcatcctcgtcatcattcggaattctcaaatttaaaaaatgcccatttccttgttgttttatttttttaattccctgatcattaacataagtaattatctttttatgtgtttatttgtcattcaggtttcttctgtgaaaagcctatttctgtcttttgcttgttcttatgttgaattgtctctacacattcaggattctaatcttctgtcagttatgtggattgcaaataaagtctcccagtctatggcttaactcttgacactatatttatcacgtcccttatttactaaagatttaaatatgatcaaatttatgttttcttttagggttgtgccttttgtatcttatttaagaactgatttctttaatgtgagatcacaaaagggttataaatattctaaaaatgttaaacttttgcttttcatagttagatctttgatccacttggaatttatctttgtgtgtggtgaaattaggaagcccatttcatttttccccagatggatagtcagttgtgtaagtgctgtttatcaaataatccatcctttatcgagggttttctgatgccacttctgttgcatcttgtgtttctttatgtatgtcagtttatttctggactctccaatctgttttatggtctgtttgtcgctataccactgccacgttgtttaaattactaatgctttgatatccaatagaacatgtctgctttctgttacgggagataaatttacatttttaagaagtttatataaatggaatacatatcatttactcttttgtgtctgagttgtatgtctttgtcatgatgtttttgtgattcatccatgttgtatgtattaatagcttgttcctttttattattgggtctattgtgtgtatatatcacaatttgtttatttatctattgatagacatttggcttgtagtcactttttggatacaatgaatagaggttctatgaacattagtgtacaagttattgtatggacatactgacagagcaggagcacagtcctcttggacaaacactgccactttaagttccagctccatttttagcctcatgcatctcagggaaatcacttctcttctaactacaagtagccagaaagagcaaacagtaaaccacagataaaacagctcaggcacagagggaggagggagaaaagtctcttgggtaactgccacacttcaccctcatacagtgggccccagtaaaacagtgggcgttaataaacacattattttcccttcaggtgcactaaaatagggaagctaaaagcagactcggggggtatgcctgcagctgcagaaaaatgtataaaaacagacacacaactctccctccaaaataagcacaacaaaaaacacaaaagcagtccaagcctctaataaactctcctatcctaaatccttaaaaactcttagtctgtaagagagtgtgctgttgacctagctcagccaaaagctcctcacaggttcgttttctctaaaataaacctgtcttaactggcaagccacctttcgtgttttttttcctctttctttaattcttacacatactgttttatttctcttgagtgaacacccagaaatagaatagcagagccatatggtacataagttgattagctttttgagaaaccaccaaactgttttataaggcaattgtatagttttacatgtgtagcatcagtgtgtgaatattctagttgttctacgtccttgttaacatttggtattgtcagacttttaaattttagccatctaaaaatttatagtgttattttatggtggttatagtttgcatttcccccatgactaatgatgctgaggatcatctcataggctttttgaagtatgtgttcaaatcttttgcccatctttaaaaattagggtttttgttttgtacaaatacttggaaattaagcaacatactccagaatgaccaatgggtcaatgaagaaattaagaaaaataaaaaaacttactgaaaatgatgaaaacatgtctaacaaataaaaattgatacacaacataccaaaatctatggaatacagtaaaagcagtactaggaggaaagttcatagtaatgattgcctacgtcaaaaaagtagaaagatttaaaacaacttaacagtgaacctcaggaaactataaaagcaaaacaacaacaacaaaacccccaaactccaaattagtagaaggaagtaaataataaagatcagaacagaaataaatgaaataggttggaaaagtaatacaaaagatcaacaaaatgaaaagttgttttttaaaaaaaattgactaagcattacctagactaactaagaaaaaagagggaagaaccaaataaatgaaaaaggagatgttacaattgataccacaaaaatataaaggatcgtaagagactattatgaacaccaataaattggaaagcccagaggagatggataaatttctgggcacctacaacctaccaagattgaaccaggatgagatacaaaatccgaatagaccaataacaattattgaggaacctcaataataatttttattaaacaacaataaaaagtttcccaattaaaaaaaaaagctcaggactggatggctttactgctggattctaccaaactttgaaaaataactaccaattcttctcaaactattccaaaaaattgaagggaagagaattcttccaaactcattctataaggccagaattaacctgatacaaaaccagacaaggatacaacaacaaaaaaagaattttgcaggccagtatccctgatgaacataaatggaaagttcctcaacaaaatactagcaaactgaatccaacagcacattaataagtttatttactaaaaccaggtgggattcattccagggatgcaagagtggttcaacatacgcaaatcaacaaacataatacatcccatcaacggaatgaaggacaaaaatcatatgatcaccacaatagatgcagaaaaacagttgataaaattcaacatccctccatgataaaaactctcaaacaattaggtttagaagaaggaacacacttcatcttaataaaggccatatatgacaaatccacagctaatattgtaccaaacagggaaatgttggaagttttttctctaaaaactggaacaagataaggatgcttaccctcactactctgattccacatagtactggaagttctagccagagcaattaggcaacagaaagaaataaaagacatccaaatttggaaggaataagtcaaattgaccatgtttgcagatgacatcctcttacctacagaaaaatctaaagactccaccaaaaaactcttagaattgatatacaaattcagtaaagttgtgagatacaaaatcaacatacaaaaatcagtagcatttctatacaccaataataaactatctgtaaaaggaaccccacttacaatagctaccccccaaaaaaaacctccacctaggagtaaatttaaccaaagaggtgaaagatctctagaataaagactacagaacactaataaaagaaattgaagaggacataaaaaattggatagatatcccatgttcatggattggaaaaattaatattgttaagattccatactacccaaaggaatctacagattcagtgcaatctctatcgaattttcaatggcatttttcacagaaatggaaaaaaagattcttaaatttgttaggaaccataaaagaccccaaatagccaaagcaattgtttgttttattttattttattttattttattttattttattttattttatttcacttcatttcattttatttttgagacagtctccctctgtcacacaggttggagtgcagttgcatgatctcagctcactgcaatctctccctcctgggttcaagcaattctcctgcttcagccacctcagtagctagaattacagacatgcactaccatgccctatttttagtagagatagggtttcaccatgttggccaggctggtctcaaactcctgacctcaagtgatccacctgcctcagcctcccaaagtgctggtattacaggcatgagcctctgctcctagccaagccaaagcaattctgagcaaaaagaactggagggatcacactactttactttaaaatataatactatagtaaaacagcattgtattggcattaaagcaacacataaatcaatggaacagaatagagaacccagaaataaattcacatatttatggcctattgattttctgcaacagcactaagaacataaactgaagaaaggacacctttttcaataaatattgctggggaaactggatattcatatgcagaagaatgaaactagagccccatctatcataatataaaaaagtaactcaaaacgaatcaaagacttaagtgtaagaccccaaattatgaaactactaagagaaaacataaggaaaatgttctgagcaaagattttatggataagacctccaaaacacagtcaacaaaggcaaaaatagactaatgggattacatcaaactaaacatttctgtgcagcaaagtaaacaatcaacagagtcatgtgacaaactacagaatgggataaaatatttgcaaacggtttctctgacaaggaattaatatctagaatatacaaggaacttaacagcaaaaagccaaataatctgatttttaaaatcggcaattgatctgaacagacgtttctcaaaagaagacataaaatggccactaagtatttgaaacagtgctctatgtgactaatgattagggaaatgcaaatcaaaatcacagtgagatattatctcacgccagctagaatggctatcatcaaaaagaagaaaaaataacaaagctagcaagaatgcagataaaaggaaacttaaaacatttcagcttttactttagattcaggggttacatgtgcaggtgtattgcatgatgttgaggtttcagaatatgattgaacccatctcccaggtggtgagcatagtacccaatatgtggttttgcaacccttccttcctccttccctccctcctcttatactccccagtgcctagcattcctatttttatgtccatgcgtacccaatgtttagctcccacttataagtgagaaatgtagtatttggttttctgtttctgcgttaacttgtttaggataatggcctccagctgcattcatgttgctgcaaaatacatgatttcattcttctttttgtggctgcatggtattccatggtgtatacataccaccacattttctttatccaatctgccattattgggcatctaggttgattccatgtctttgctactgtgaatagtgctgtaatgaacatataagtgcatgtcttttttttggtagaacaatttattttcctgtgggccatatacccagtagtgggatttctgggttgaatggtaattcagtttttattaatagttctttaagaaatctccaaagtgatattcacagcggttgaactaatttacattcccaccaacagtgtataagcgacaaagaaaattctcacacattgttggtaggaatgtaaattagtacagctattatggaaagcagtgtggaagttccttaacaggctaaaaatagaactaccatatgatccagtaatctcgctactggacctatatccaaagaaaataaaatcatatgtcgaagagatacctgcactcccatctttactgtagtttcatttataataatgaagatatggaatccaccgaagtgtctatcaacagatgaagagataaagaaaatgtgggatatatagacaatggaatgcagccataaaagagaatgaaatcctatcattggtggcaacatggatgagcctggaggacattatgttaagtgatataagccaggcacagaaagacaagtttcatatattctcacttacatgtgggagctaaaaaagttgatctcagagaagtagagagtagaatagtggttactagaagctgagaagggtagggagacagagattgatcaatgaatacaaaattatatatatggatagaggaaataagttttagttttagtgttctatagcattgtagggtgactatagtgaacaataacttattgtatattttcaagtactgagaggagaaaattttgtacattaccagcacaaagaaatgataaacctttgagataatggatatgccaattacacagattcgatcattatgcattgtatgcacgtattgaaatgtcacttcaccccataaatatgtgcaattacatgtcatttaaaagtgataagaaaaattagtttttttgatcttattattgactcgtaggaagcttatatattctgaaaagaagtccattttcagatgtgtactaaaaatattttctttcattttatgacttacctttccattttctttaatggaaacttttaaaaacttttaaaaaacaaagttttaaaaaaatctagttaaggtccagtttgttaacttttttctaatatggcttgtgacgcttattccttctgcctagaatgttcctgggatgtttgtggagctaagtcctcgcttccttcaattctttactcaaatatgtccaccctatttaatgtcaactgtccaccgtatttaatgccaccctatttaatatcactaacacctcctcccccctcactcttgacattcattctagtctattttacatttttttctcatagaactcataaatttctagcatgctttataacttacatattcattatgtttattgtttattgtccgtctttgttccagtaaaatgtaaactcctagaagaacagagacctgtgttttgttcactgatgtaccctaagtgctcacaagtgtttctagcacctagtatttgctcaataaatatttgctaggttgatgaattaatgatttctaagctttccttcagcctgaagagttttctgattgtaagattctacttagataatcctaattgtctcagtgactctcaccagtcactcacttctcccacaaggtggcagtctttaccttcaacacaggttctggtagcctcaaatttgagaattaatagctgagttaacctgcttgttttctttgagcccagacagcctgccctatgggaactgacagctgtaaaatttaaaggacgagtgtaattaccctgcaagatctgagtgcttttaggcaagaggatttagggggtgagagttttcctggagagggacacattatgaaggtgatattgcttaattgatggggactttgaaacatagttgctctttgtgagaatggtataggtttagagagaggtgctagcacagagctgtgacacctgaagtaggctgaccgcagacaaattggatttaaccaccaaatatatctgtgttttcatgtcttcctgccccgtgccctcttatctgactcactttaccccagcactggggaataactgtgccctattctggtcctgacccttttgtaccatctagggaaatgagaactcctcttggggtctcagatcctcatttctgttagaaccaatcctattctgtgggtagggccatggttgtaaatttcctgtgggaggcagcattgctttgcaaaaagaacacagtttggcatgtgaggcagctctgccacttggacaaggtgataacgctttagtctctttatttctaaaacagggaagatgctaataccccgcccatggactagtatgagatttaaatggcaggtacttggcacagtggcaggtggtgaatgctctttggtgatcatgactatccctttctcctggtagtgctgcctcctccctctgagcacctggagtcaatccaccttgggtaggtcagagaaggcagaagaaagtggtgggaggtgaactcgacggaatgatgtacagggcgatagggtgagtgagaggtctgggatctattggcaggagcagaatggtaggaaagggaaaacatgccattgaccttgaatcttgacatttgtgcccatcctatgctgtgttgagcctcaggtcaccgtttgcggaggtgagcagaaaactgctaacagatcgaggcttctccagccttctaggtaaactttcatcagtgggttagttgtcttgttcagaagctgatcacggagctttggccaagcataaacactgattatggcagtccaattgtcataatccctttgattctttaatatcaccttcaagattgtttgttattgtcaatgcccccacaacctaagaccaccaggaacacactgtaattgaaaaaggtgggtttgttgctctctgcaagaagggaggacactcagcatagagactcatgagggtggggcaggttttatccgatgacgttagaaaggacttactgaggatttgggcttgttttaggagatttgggggaaaggttcaaggagactggcttttcctggatgctgccaggaagtagtgggatggtagtaagtctgtggtaggatgtttaaataaatttcctctactgggctggaagaatgagaaggctgaagctgtaataagtaaagaagtggcagtcactcctatcagctatgataaaaggatgtttggctattactttatggtttggatgctatttttgcttgtgttcacatcatggtctatcatggtgataggccacgtacacagtggccttgtctgatgctggtgtcccatggagttgattatgctcagctgaaggacactaaggcccaactgtgggggccaggccagctcctgagtgtcagcgggggctgcactgctttgtcattatcaacatctccacatacaatacagcctgtgcatgtgaggtcccagaaggaaggagctaaagcagctagactgggatcactttactcaatttgaggagaggagtgctcttgagggaaccagaggaaggcagatgagctggtctgatctccttttctattggagctctatgcagatagactgaaaatatttgctaaaacaaagagctccatctctagaatacccttagcaggatgtccttgattaaaggattatttctgaaaactaaatccagaatccgtgaggcatgattccctggaagatcatgtaagctgtacaattctctatggaataaattggagacttcatcccttagatccctttgactgtgtgaggaaccccacgaaacctcacttagtgactttattcattcttctgggcctgaaagcatatgtctcatgcaggaaggaaggcaggaccagtggggctttgcaggttgtgccattctctccttgctttgcttgagactctttattacctgtctccctgacattatttgtagtgtgattctgggtgtgttctgtgattcttgtgactaggtatccaattttgcttaaggatgcaaggaagtgtttggggagaaagctctattggaagaggtctgtagtcctagcctccctccccaccccacatttcacatcattagacctcagcacatgggtctggggcaccaacactgtcttacctgttacacagtgtggtctttatctggatgagggatgcgaaaggatacattgtggccaagagacctgggagaggcacaaaaataacaggtgaccaccaagggtgcttggacctgagatgtttccatttcctaagaccctccaagattctccaacatttggtatagttgcccaggcaatttaacaagaaaatcaaatttttgttatgacccccattgtaatttatgcttatcgcagaaaaattgagactataagaaggagaatagaaggtcacaaaaccactctatactagtccagggatagctattcttacaacatggattgatcagtgtggggtgatttctcctagtgttttttggacagagaagcattgaagatgccctggttttaaggtcttaggatgaaggaattatagttgaacagttcaaaatgatgttatgaattactttcagatttgtttgcttgattgcattagccttgcctggccctacggtaactatttggttccatcatggtggctgagtaggtggctctggaaaaagagctattcaagaaaagcttttctttctctaaaaatattgtagggggctcgccctctgttcttggaagcaacgtttgggatggcctcttgggaggctgtctggtgaagtgtctaggggtatgtggtctggacttggacaggacaagatgcaaattctggctgggatattctagttgtggagtgttgggcaagttacttggtcttctgagtttataggtaaactggagataataggtatgtgtgaatgaggatccaatgagatgcctgtaaaacacttagccagatggctgcgtgaagaaagcacttggtaaatgctaattgttgtggttgttataattagtacaatgattagtcattgctgattgttggctaactggcggtaagaaatgaaagtaaagtaaggcagtagcagctgagggaggtggtggagggaatcaggagacacttggaggttctggttctgcctgagtttaagtgctggggaaaactagttgaataactgctggtctaacatttaacagctgtgtgacctcgggctagtcacatttcctttataaacttcctttttctcatttgcgaaatgaaggggtttcgttaggttacttctcatcacccctggttgaccattagaatcgtttgggagacctttttagaaattcttggttctggggtcttccattttccccattctcacttggtgggtctgaaagcaggcactgcagcttttccaaagctcttcaggtgaccttgaagtgtggccagggctgagaacctctgacttccaacagcacttctggtttaggaaggagcaaatcacaggcacagaatgagctctcaggaacggctgctgagctagtaattgccgtgacactgtctccctgtcccaactgcaggcacccctagacgtctcctgatgaagacttccaattttggaacagaagaatctttgaaaaaaatattattgaacttccagaaatgattcattccttctctgctccttctttagttggaaagatctgcccccatccctgtctactgcagtcccaatccctttttatttcaacatatatatccaaaccaacaaaaaaattgactcgcacaaccaaggtgaggtgtttggctttaaggataaaataaatagtttcataaaacctgcccccagatttctcattgcctctactcattttctctaatttgtagggcacactgaaagctcggattcataagatgtagaaagggcagagagttaagttacaaactcttcctaggtctgtttcaactctaacgttctatagctctgctccgtctaaacaaggaattctgttaaatttgtaacctggactttcttgaatactgaggtaatgtttcttgaagtaggatatatatacccaagaagaataaaaataattctggaggtgtcttaattctctgtgggactcaataaaagttttggtgattatatataaacacacttatgaaagcatctggtacatgtaggtgctcagtgcacatgaatttctctttcctgccagatcttttgtagtggaaaattatcttattcttccatctttgtctgcaaagatgctgctaaggaaagatgtagaagagttttacaagggagttggagtatgggaacaggaagttcccaagaaggccactgcattaatagaattgaaacaagatcccctaaaggaaaatcgctgccaaatctcttttctctaaactatccaaaatggtgccccataaattttcattgacattgaagtacataatgtaataagcttttttttccttaaatatataatgtacggagaaaaccaggttgataatggtttcctggcatagctttcaaaggcaagtgtggatgaagtggaaatatggtgcacagatattggaaagaaaccgctgttgaactcttcacattttcatgtataacccaatgattctcaaacctaaacttgcatcagaattgcctggagggcttattaaaacatgattgttggatgccacccttgcattaattaattacacctgcaactgttctatttttaaatggtcacattttaaggtactgggctgaggacttcattatgtgagtttcaaatgggacataattcaacccctagcccaatcctagtgagtggtgagtggtatctcttcgttttgatttctacttccctagtgactaatgatgttgagcatttttatgtgtgtttattagccatttttatatctcttatgaaaaaatgtgtataaaattattggcccatttgttaattgggttatccatttattattgaattataagagctctttactactctggatgcaagtcctgaaacagaaataatatttacaaatattttaatccattctgtgaattttattttcactttcttgatggcgtcctttgaagaacgtaggattttaattttgataaagtgtaatttatgtattttttcttttgttgctgtgcttttggtatcatatttaagaaataattgcctaatccaaggttatgacaattttttattctatgtttgcctctaagaattttctaattttaccttttatatttaggtctttcattcattttgagtcaatttttgtatatggtgtaaagtatgggtcctaatttattcttttgcatgtggatatcttgttgtccctgcaccatttgttgaaaagtgttgttttttttttcccattgaatggccttggcactcttgtctaaaattaattgatggtaactgtaagactttatttctggactctttattccattgatctatatttctatcattgttactgagcaatgtgcttgctgcctgacagatagggaagccaatattatggaactggtttttgagaaaagcaaaagctttatcgtgaggttgacttgcaaggaaacaggatgcaaagctcaaatctgtctccccttctgggatctgggacaagttttatgggttagggagggcaagctggtatgcagaagcactggtagggcaggtttcaactggaagtactttaaacaagaccatttatggtaaggtatggtaagggtcttaacactggacatgcctgggctcaggtttcttgcttttaaaaatgtttgggccctcaggttccagtcatgtcttgaccattttcttctgtggtggggcaggagaggaatttttcttctgggtgttattcaaggttgaggtcttcttttctgcattgcttcggctgcatgacttaacaactttttgactttgtgcctgtaaaataacttgacatactattatcatcagagtagggccagttagaactggtcctgtgattacatcattatgccagtaccaattatcttgattactgtagcattgtagtaagttttgaaatcaggaagtttgtgtctttcaactttggtcttctttttcaggatttttggctcttctgtgttccttacatttccatatgaattttaagttaaactgtcactatctgcaaaagaaggaactgggatttttatagagattacattgaagctgtaaatcagcttggagaatactgtcatcttaacaatattaagtcttctggccgggcacggtggctcacgcctgtaatcccagcactttgggaggccgaggcgggtggatcacgagctcagaagttcgagaccagcctggccaacctggtaaaaccccgtctctactaaaaataataataataaaaaactgggcatggtggcatgtgcctgtaatcccagctactcaggaggctgaggcaggagaatcatttgaaccctggaggcagaggttgcagtgagccgagatcgcaccattgcactctagcctgggcaacagggcgagattctgtctcaaaaaaacaaaaacaaaaacaatattaagtctcctgatccatgaatgtagaatgtttttccatttgttcaggtcttctttactttgtaacagtgttgtgtatttttcaatgttccagtcctgtaattctttgttatatttactcctaagaatattaattgttttgctgctattataagtggaattgtttaaattttgattttatatttttcattgatagtatatttttcattgatagtatacaattgatttttgtacactgattttgtaacctgaaaccttgctgaccatgtttactcgttctaacagtttcctttttgtggatttcttataattttctatatacagtatttcatgtcatccatgaaggggataggtttacttcttcttatctaatctggatgagtttagtttatttttcttacctaaattccttggctagaactccaatacaatgttgaatataagtaatgaaatcagacatctttggactgtacttgattttaagggggagcatccagtcttttgccattatgtataatgttagctgtggggtttaatagatgaattttatcaggttgaggaaattttatttctaatctgctcagtgtttttttcatcacaagagtgttggattttgttaatatttttgtgtgtctattgagatgatcatatggtttttgtcattctacaaaatacagcacattaaattgatggatttttacatgttaatttttttttaaattttactttaagttctgggacacatgtgcagaacgtgcaggtttgttacataggtatacatgtgccatggtggtttgctgcacctatcaacctatcatctaggttttaagccctacatgcattaggtatttgtcctaatactctccctccccttgctccccacccccgccgacaggccccggtgtgtgttgttcccctccctgtgtccatgtgttctcactgttcaactctcacttatgagtgagaagacgtggtgtctggttttctgttcctgtgttttttagctgagaatgatggcttccagcttcatccatgtccctgcaaaggacataaactcattcttttttatgactgcatagtattccatggtgtatatgtgccacattttctttattcagtccatcatttatgggcatttgggttggctctaagtctttgctattgtaaatagtgctccaataaacatatgtgtggatgtgtctttatagtacaatgatttatactcctttgggtatatacccagtaatgggattgctgggtcaaatgatatttctggatctagatccttgaggaatcgccacactatcttccacagtggttgaactaattcacactcccaccaacagtgtaaaagcattcctatttctccacagcctcaccagcatctgttgtttcctgactttttaatgatcgtcattctaactggcgtgagatggtatccattgcgattttgatttgcatttctctaatgaccagtgatgataagctttttttcatatgtttgctgggcacataaatgtcttcttttgagaagcatctgttaatacccttcgcccactttttgatggggttgtttttttcttgtaaatttgtttaagttgtagacttaggatattagatctttgtcaggtggatagattgcaaaaaatttctcccattctgtaggttgcctgttcactctgatggtagtttcttttggtgtgcagtatctctttagtttaattagatcccatttgtcaattttggcttttgttgccattgcttttggtgttttagtcatgaagtctttgcccatgcctatgtcctgaatggtattgcctagattttcgtctagggtttttatggttttaggttttacatttaagtgtttaatccatcttgagttaatttttgtataaggtgtaaagaaggggtccagtttttgttttctgtatatggctagccagttttcccagcactattaattaaataggtaatcctttctccattgcttgcttttgtcaggtttgttgaagatcaggtggttgtagacatgtggtattatttctgaggtctctgttctgtttttgttttttgttttttgttttttgttttttttttttgagatgagatctcgctctgttacccaggctggagtgcagtggcacgatctcggctcactgcaacctccgcctccctggttcaagcaattctcctacctcagcctcctgagtagctgggattacaggcatgtatcaccgcgcctggctaatttttgtatttttagtagagatggggtttcaccatgttggtcaggcttgtctcgaacttatcacctcatgatctgcctgcctcagcctcccaaagtgctgggattacaggcgtgagccaccgtgcccggccaaggtctccgttctctttcattggtctatatatctgttttggtactagtactgtagttactgtagccttgtagtacactttgtagtcaggtaacgtgatgcctccaacttcgttctttttgcttaggattgtcttggctatacgggctcttttttggttccatatgaaatttaaagtagtttttttctaattctatgaagaaagtcaatggtatcttgatgggaatagcattgaatctatcaattactttgggcaatatggccattttcacaatatttattcttcctatctatgagcatggaattttttctatttgtttgtgtcctttatttccttgagcagtggtttgtagttctccttgaagaggtccttatgtctcttgtaagttgtattcctaggtattttattctctttgtagcaattttgaatgggagttcactcgtgatttggctctctgcttgtctattattggtatataggaatgcttgtgatttttgcacactgattttatatcctgagactttgctgaagttgcttatcagcttaaggaggttttgggctgagacgttggggttttctaaatatacaatcatgtcatctgcacacagagacaatttgactttctctcttcctatatgagtacactttatttatttcttatgtctgattgccctggccagaacttccaatactatgttgaacaggagtggtgagagaggacatccttgtctcgtgccacttttcgataggaatgcttccagcttttgcccatttagtatgatatgggctatgggtttttcagaaatagctcttattattttgagatatgttccatcgatacctagtttattgagagtttttagcatgaagggatgttgaattttattgaaggacttttctgcatctattgagataatcatgtgatttttttcattggttctgattatgtgatggattatgtttattgatttgtgtatgttgaaccagccttgcatcccagagatgaagccaacttgatcgtggtggataagctttttgatgtgctgctggattcagtttgccagtattttagtgaggatttttgcatcgatgttcatcagggatattggactgaaattttctttttttattgtgtctctgccaggtttcggtattaggatgatattggcctcataaaatgacttatggaggagtccctctttttctattgtttgcaatagtgtcagaaggaatggtaccagctcctctttgtacccctggtagactgcatgttagacgagataatatgtatgaactacctggcatataatagatgcttcctaaataagattctaaaaaataattatgctccaaaaatatttttaaaatcaaataatttatgttttattttctgtgttttatctcagacatgtagactgccaaagtgtatgggatgctttcaagggtgcatttatttcaaaacatccttgcaacattactgaagaagactatcagccactaatgaagttgggaactcagaccgtaccttgcaacaaggtaattgggggcatgccattgattttaaaactggggataaaagccaatggtaacaattcataggtccaaatttttattagaatgaaggaagaggaaaaatccagacattatagtgtgagtgtggttggtaggaatggaatttgcaggccattgaggggccatgatataattaagatttaggacatctggagaagggagctaagagagagaaatagggatacagagataggaaaggggctttggccaaaaactaggcagaaaaaacctaacaccaaacccaactcgaacaaacaaattaacacgacctatataataacaaaactttcccctgacctatgataataatagtagtagtagtagtaataacagcaatgccaagttacacttgcagactgcttcttctttttcttgcttacaaaagactctcctaatccttactttcttaggccttcatagccattctctggaatgggcacatcaggtgtcagcatcccaatttcaccagtgagaaaactgagggttggtgtgtttaggtgaccagtgttgcccaagtttgacaggcttcaaagtgaccagtttaaatgtaaatggtatgagacctggagccacagaggcctggattctaatacattggttatattggaaaagctctatcagagtgcaccttttctatagccaatgtttaaggcaaaattccatgtgcctaaaattttctttgtgaagcccttaaatccatccagaaattacagcctctcattccattgttagtgagctggagtcattgtgaaacttctccattcactaggcgtgatgccctatgcagagaaggtgtttggcaaataataacccaggctgacatttgtcaaataagtgactatgcgatggatagtatgctaagcaatttacttgcatttatctcagttaatttccctagcaccccattagtttatttcagtcattatcattaccattttacaggtgtagaaagtggggcttagtgatgttttggttgctcaaggtgaaacacctgataagtgatgatgatgctgggcttcaataagggctgggattttagggcccatactttaaaccagtatccttcactgactcccattaagaatgaatagggggaggagccaagatggctgaataggaacagctccagtctgcagctcccagtgagaccaacgcagaaggtgggtgatttctgcatttccatctgagatcaggtttcctcgtgtgtctacaccaccagggccctgggtttcaggcacaaaaccgagccgctgtttgggcagacaccaagctaggtgcaggagtttttttcgtaccccagtggcgcctgaaaccccagtgagacagaactgttcactcccctggaaagggggctgaagccagggagccaagtggtctcgctcagcgggtctcactcccacggagaccagcaagctaagaaccactggcttgaaattcttgctgccagcacagcagtctgaagttgacctgggatgatggagctgggtggggggaggggcgtccgccattactgaggctttaataggcggttttcccctgacagtgctaagggggctgggaagtctggactgagtgtggcaacgtggttgtggccagactgcttctctagattcctcctcactgggcagggcatctctgaaggaaaggtaacaaccccagtcaggggcttacagacaaaacctccgtctccctgggacagagcacctggcagaaggggcagctgtgggcacagcttcagtggatttaatcattcctgcctgctggctctgaagacagcagctgatcctgacaagagggattctcccagcacagcacaccaactctgctaaaggacggattgcctcctcaagtgagtccctgacccctgtgtctcctgactgagagagaccacccaacaggggtcgatagacacctcatacaggagagctccggctggcatcaggccggtgcccctctggaatgaagcttccagaggaaggagcaggctgtcatctttgctgttctgtagcctccactcgtgataccttcaggtgcgggaggaacccaggtgaatagggtctggagtggaccccctgcacactgcagcagccctatggaagaaagggcctgactgctaaaagaaaaaacagaaagcaacaacatcaatgaaaaagaccccacaaaaacccatccaaaggtcagtagcctcaaagatcaaaggtagataaatgcaagaagatgagaaagaatcagcacaaaaatgctgaaaactcaaaaagccagtgtgcctcttctcctccagatgatcttaacacatctccaacaagggcatagaactgggctgaggcccctaaaaagagatgagttcatgtcctttgcaggcatatggatgaagctggaaaccatcattctcagcaaactatcacaagatcagaaaaccaaacaccacatgttctcactcataagtgggagttgaacagtgagaacacatggacacagggaggggaacatcacacaccagggcctgtcaggggtgggtgctaggggaggataacattaggagaaatacctaacgtaggtgacgggttgatgggtgcagcaaaccaccatggcatgtgtatacctatgtaacaaaactgcacattctgcacatgtaacccagaacttaaagtataaaaaaacaaaagatactagctacatttacccaatgttaaaaaaaaaaaaagaactgggctgaggctgaggtggatgaattgacagaagtaggcttcagaagatgcataataatgaaattcactgagctgaaggagtatattctaacccactgcaaagaagctaagaaccatgataaaacataggagctgttaaccagaataactggtttagagaggaacataaatgacctgatggagctgaaaaacacaacacgagaacttcaagatgtaaacacaagtatcaataaccaaatagaccaaacagaagaaaggatatcagagcttgaagagtatcttgctgaaataagacaggcagacaagattagagaaaaaagaatgaaaaggaacaaacaaaacctctgagaactatgggattacataaaaagaacctatgactgattggggtacctgaaagagacaggaagaatgaaaccacgttggaaaacacacttcaggatatcatccaggagaacttcttcaacctagcaagatgggccaacattcaaattcaggaaatccagagaaccccagtaagatactccatgagaagatcaaccccaagacacataatcatcagattctccaggtcacctataaagggaagccaattagactaacagcagacctctcagcagaaacctacaagccagaagagattgggggccaatattcaacattcttaaagaaaataatttccaaccttgaatttcatatctagccaaactaagttcataaatgaaggagaaataaaatctttttcagacaagcaaatgctaagggaattcgtcaccaccaggcctgccttgcaagagctcctgaaggaagcactaaatatggaaaggaaaaaccattatcagccactacagaaacacaccgaagtacacagaccaatgacactatgaagcaactacgtaaacaaatcttcacaataaccagctagcatcatgataactggatcaaattcacacataacaaattaaccttaagtgtaaatgggctaaatgtcccaactaaaagacatggaatggcaagctggatagtcaagatcaattggtgtgctgtatacaagagacccatctcacatgcaaagacacacataggctcaaaataagggatggaggaatatttaccaagcaaatgggaaacagaaaagagcaggggttgcaatcctagtttatgacaaaacagactttaaaccaacaaagatcaaaaaagaaaaagaagggtattacataaggataaaggggtaaattcaacaagaagagcaaactatcttaaatatatatgtgcccaatacaggaacaccgagattcataaaacaagttcttagagaccttcaaagagatttagatacccacacaataatagtgggagaatttaacatcccactgtcaatattagacagatcatcaagacagaaaattagcaaagatattcacgacctgaactcagctcaggatcaagtggacctgatggatatctactgaagtctccatgccaaagcaacagaatatacattattattggtgccacatggcatctactctaaaattgatcacacaattggaagtaaattactcctcagcaaatgcagaagaactaaaatcataacaaacaatctcacagaccacagcataatcaaattagaactcaagattaagaaactcactgaaaaccatgcaattacatggaaattgaacaacctgctcctgaatgactcctgggtaaataataaaattaagccagaaattaagaagttctttgaaactaataggaaaaaagagacaatgtatcagaatctctgggatgcaactaaagcagtgttaagagggaaatttatagcactaaatgcccacatcaaaaagctaggaagatatcaaattgacatcctaacatcacaactaaaagaactagagaaccaagagaaaacaaatcccaaagctagcagaagacaagaaataaccaagctcagagcagaactgaaggagatagagacacaaaaatcccttccaaaaaaaaatgaatgcaggaggtggttttttgaaaaaaaattaatagaatagatggatcgctagctagactaataaagaaaatagagaagaatcagatagatacaataaaatgataaaggggatatcaccacagaaatacaaacaaccatcagagaatactataaatacctctatgcaaataaactagaacatctagaagaaatgaataaatttctggatacatacaccctcccaagactgaaccaggaagaagttgagttcctgaacagaccaataacaagttctataattgaggcagtaataaataccaaccaaaaaaaaaaaaaaaaaagcccaggatcagacagatttataactgaattttaccagatttacaaagaggagctgataccctttcttctgaaactgttccaaaaaattgaaaagtaaggactcctccctaactcattttatgagactagcaccatcctgataataaaaactggcagagatttaaaaaaaaaaagaaagaaagaaaacttcaggccaatatcctgaagaacatcgatacaaaaattctcaacaaaatactggcaaactgaatccagcagcacatcaaaaagcttatccaccatgatcaagttggcttcatcctcaggatgcaaggcaggttcaacgtacatgaatcaataaatgtaattcattacataaagagaactaaagacaaaaaccacatgattatctcaatagatgcggaaaaggccttcgataaaattcaccatcccttcacgttaaaaactctcaataagctaggtatcaaaggaacatacctcaaaataataagaaccatttatgacaaacccacaagcaatatcatactgagtgggcaaaagctggaagcattccccttgaaaaccggcacaagacaaggatgtcctctctcaccactcctattcaacatagtattggatgttctgaccgggacaatcaggcaagagaaagaaataaagtcttttcaaatggaaaaaaggaaataaaattgtctttgtttgcagatgacatgatcctataactagaaaaccggatcatctcagccccaaagcttcttaagctgataagcaacttcagcaaagtctcaggatacaaaatcaatgtgcaaaaatcacaagcattcctgtacaccaacaacacgcaagcagagagccaaatcatgaatgaactcccattcacaaagggaataaaatacctaggaatacagcaaacaagggaagtgaaggacctcttcatggatacctataatccactgctcaaggaaatcagaaaggacacaaacaaatagaaaaacattccttcctcatggataggaagaatcaatatcgtgaaaatggccatactgcccaaggtaatttatagattcagtgctattcccattaaactactattgacattcttcatagaattagaagaaactattttaaaattcatatggaaccaaaaaagctcatatagccaagatgatcctaagcaaaaagaacaaagctggaggcatcgtgctacccaactccaaactgcactacaaggctacagatgccaaaatagcatggtacttgtacaaaaataaacacatagaccaatagaacagagtagagatctcagaaataaaactacacatctgcagccatctaatctttggcaaacctgacaaaaacaagcaatggggaaaggaatccacatttaataactggtgcttgagaactacctagccatatgcagacaattgaaactggaccccttccttgcaactcatacaaaaattaagatgaattagagacttaaatgtataacccaaaactataaaaaccttagaagaaaatctaggcaatatcatttgggacacaggcacaggcaaagatttcatgaaattgccaaatgcaattgtaacaaaagcaaaaattgacaaatgggatctaattaaactaaagtgcttctgcacagcagaagaaactatcatcagagtgaacagaaaacctgcagaatgggagaagatttttgcaatctatccctctgacaaaggtctaatatccagaatttacaaagaacttaaacaaatttacaagaaaaaaataaacagccccatcaaaaagtgggcaaagaacatgaacagacacttctcaaaagaagacatccatgtggccaacaaacatatgaaaaaaagctcaacatcactggtcattagagaaatgcaaatcaaaaccacaatctcatgccagtcagaatggcattattaaaaagtcaagaaacagcagatgctggtgagattgtggagagatagaaatgcttttacactgttggtgggaatgtaaattagttcaaccattgtggaagatagtgtggcaattcctcaaagatctagaactagaaataccgtttgacccagcaatcccattactgggtataatagaaatcattctattataaagatatgtgcatgcatatgttcattgcagtgccattcacaatagcaaagacatggaatcaactcaaatgcccatcagtgataggctggataaagaaaatgtggtacgtatacaccatgaaatattatgcagccataaaaaggaacaagatcatgtcctttgtagggacatagatggagccagaagccacatcttcagcaaactaacacaggaacatgcaaatgctgcatgttctcacttataagtgggagctgaacagtgagaacacatggacaccaggaggggaaaaacacacactgtagcttgttggggttggggtgaggggagtgagaacattaggacaaatagctaatgcatacttggcttaatacctaggtgatgggttaataggtgcagcaaacccatggcacatatttacctatgtaacaaacctgcacatcctgcatgtataccctggatatacatgcccaggatatacattttatttaaaataaaaataaaaataatagattcataaaacagaatataattctgaactttgactccctgtacctttaagagggacccttaaatttaaaaatctattgtattttttttttagtaggggtagggaatatttagggaatttggaaggggttatatagttctttaagaatcaaatagcacatcttcctgaaaatagcacgtagacaaagtttttttggagataaccttaggaatatcgtaactctctgatgccacctccatatgtgatcctatgttgattataagattttgatcagtggctttcagacttttttgactgcaacctagaataaaagattcatttacattgtgacctagaacacacacacacacacacactctctctccgccactctcctgcacacagaaatcattgatgcttacaacaattcttactcttactatgggtgatttactttgatatgctctgttttttttttcatttacaaaactgtggattaattttttttgacatgctaaattgatctcagtaatagattgtatttattcttccttagattcttctttggagcagaataaaagatctggcccatcagttcacacaggtccagcgggacatgttcaccctggaggacacgctgctaggctaccttgctgatgacctcacatggtgtggtgaattcaacacttccagtgaggctctgggccctgtgggattgcccagggatgtggagggtgaacagagtgacttctgctggaggccctgaatgattagtgtggaggacagagccacaggcacccatcctgatgccatctatacttatattagtccatttgtgttgctattaaggaatacctgaggctgcgtaatttataaagaaaagaggtttatttgactcacagttacgcaggctgtacaagaagtagggtaccagcatccacttcgggtgaaggcctgaggctgtttccactcatggagaaggggaaggggagctggcatttacagagatcacatggtgagggaggaaagcaaggagaggtcaggggaggtgccaggctgtttgtaatgaccagctgtcctgggaactagtagagtaagaactcattactataaggacagcaccatgccattcgtgcaggatcatccctatgacccaaacacctcctactagtcccgagctccaacactgggggtcgaatttcaacataaggtttggagagttaaatatccaaactatagcactacccttaatggcaactcaggctgatataaagtagcattccctgttttcttgaaaaattgacttcagagttggggattgcccatgctccctaattcccttcttttgagtgctcacatagcctgcttccgaattcttggtattttgctctctgtaaggtcatcattcaggtccaaagaagtctagaacaggatgaggtctcagtgggacctagaccaaggttcttgctcttcagaatcatcacagtagccatggactggactcttccatctcaggcactggctttgccatcatttttcagatgtagccttatcctgcccagaaagactcaacacctcaccaggggaagggatttcctacaaccaaaaccctactgcagttttcacttcttttttttttctttttgtttatatggtggatatttttactttatatagttttattcttatttttactgtttttcattgtttgtttttaaaagcttatcttattatagcttctttgtcccaggtttgcattactttcaattacaaaaataaagcatgattatttgaaaaaaaaatacttgcacattacagaaatgcataaaagcaaaaagcaaatgtcactctgaattttcccttcacctcctacctccgcatcacttctcaaagggtaactattatcagcaatttgatatagatctttctagacttttcctatgctaatgtaaacatatatatttaaaatgtacacgcgctgttgtgcaacttgctttattcacttaaaattggtaggtataaagatagctatcctcttttaaaaggctttatcattaagaatcctattaatggatattaagttgctttagttttggttgctattatgtcattattgtaagaaacacttttgtgcgcacacacacacacacacacacacacacacacacacacacctgcatacttgaacgataaatttttataaatgaaacttcaatgttaaaggataaattgtaatagaaactggtaacatgtcatttaaaagatggtaactataccctcatcaagagtatatatatgaggccaggcacagtggctcatacctgcaatcccagcactttgggaggtggaggagggaggatcacttgagcccagtagtttaagaacggcctgggcaacatagtaagaccccatctctattttacactaaaaaaagaaaaaaaaagaatgtatatgagatagtttatttacctatatccccactaacaccaggtattgttactttaaaatttttggctcatttcagaagaaaataatacctcaatttagtgtgaagttctttgatggtgaggctactatatatacataaatggtagattttctgtttcttctgtaagctggcagttcatatattttgaccatctgtatgcggtatctattattttctaattagtagaagttctttataaattaataagagctacgatgtattaagtacttacaaagtgccagtgttccatgtgctacgtaagtagtcactcatttaatcctccacagccccatgaggtcatatggtgatcccattttagagataggaagtctgaggcatggagttaagtaatttgccagccagtaagtggcaaagcaagaagcaaagtttctcagactaacttgagaaactttgctcttaactgccatgtttttctgcccactttctggctcaagttggcgaatatatttttcttattttggactttacacggtgtttatggtctgtcttttgccacccagaaatgcagaaaacctgtctgttctcttccttatagcttctgtgtttcatatcttccttaaaaagatcttcttagagaagcattcttctgtattttcacctactatttttactttcacaatgtttaaaatattttccatatttagatctgagtcttcccacctagaatatggtaatataaatatgtttttccattaatttttttagattttacagtttttcccatgttccatgttttcctttttaaatttcccttttaacaatgactgttttattggtcattcatttaacatttagcttttaaatgtatttacagtagacttctctccttttgttttattttttaatttgttcaatttttcttgaaataaagtagagaaaatgaaataatttatttttaagaactgatttatttacagttcagagttccttatttttgccttcttttaaattgaattatgtatatgtagttttatttatctacattctaatactttggcctcaatttttaatttcttcttattttatagattatctttcaagttcctgatgtatatgtatttatttactttttattctaagttgacaatttataattgtatgtatttgtggggtgaaaaatgaatttatgaatacaatgtgggataattaaatcaagctaattaacatatccaccgcctcaaatactttttttagtttttgagacagggtctcactctgtcacccaggctgaggtgcagtggtgcaatcacaattcactgcaaccttgacctaccaggctcaggtggtcctcctaccttagcctcccaggtagctgggactacaggtgcctgccaccacacttggctaattttttgtattttttttagagacagggtttcaccatgttgcccaggctggtcttgaactcctgggctcaagcgatctaccctcttcagcctcccaaagtgttgggattacaggtgtgagccaccaggcccgacctcaaatacttattttttgtagtgagaaaatgtgaagtttactgtcttagcaatgttgaaatgtacagcacactattattaactacaatcaccatgctgtgcaataaatatttttaaaaaccctttctaactgagattttgtactctttgaccatcatctccccattccttccaacttctggtctctgtatccaccattctattatctgcttctatgaacttgattgttttagattccatatgtattaggacatgcagcatttgtctttctgtgggtggcttattttacttagcatattgttttcttgttccatctatattgtcacaaatgacagaatttctttctttttaaagtctgaatagtattccattgtgtatatataccacactttatccattcgtctattgatggactcaggttgattccatatcttggctattgtaaatagtgctgcaatgaacatgggggagcaggtatctctttgacaaactgatttgaaatcttttgggtaaatacctagaagtgggattgctggatcatatggtagtattctatttttagtttgttgaggaactttcatcacattttccataatgggtatactaatttactttcccaatagtgtacaaataaccccctttcttcacattcttgccaacacttgttatttatctttcatctttttgattatacccttctgacaggtgtgagatgatgtctcattgtggttttaatttttgtttccctattaattaggaagcttgagcattttaaaatatatttgttggccatttgtatgtcttttgaaaaatgtctattcaggtcctttgcccacctttaaattgattttttttcttgtttttgagttgtttgagttccttatgtattttgtttttgtttgttttttaatttttaatttttgtgcatacataataggtgtatatatgggatgtgtgtacatgagatgttttgatatagatatacagtgcataataattacatcatgaaaaatgtctctttccccataagcatttatcttttgtgttacaaacaatccaattttattcttttagttattttaaaacaggggtgtccaattttttggcttccctgggccacattggaagaattgtcttgggccacacataaaatacactaatactaatgatagctgatgggctgaaaaaaaatcgcaaaaaatctcctaatttctaagaaagtttatgaattgaacttatgtgttgggctgcattcaaagctgtcatgggctgcttgagacccatgggccatgggttggacaagctttttttaaaatgtacaacaaaattgttattgactacagtcaccatactgtgctatcaaataataggtcttattcattctaactattttttggtaaccatccccacctccccacaatgtcttgctacacttcccagcgtctggtaaccatttttctattctccatgtccatgagatcagttgttttgatttgttggatgctaaaataagtgagaacatcctatgtttatctttctgtgtctagcttatttcacttaacataatgacctccagttctattcatgttgttgcaaatgacaggaacacattcttttttgtggctgaatagtactccattgtgtataaataccacattttctttatccatttatctattgatggacatttaggttgtttccatatcttggctattgtgaacagtgctgcaataaacatgggagtgcagatatctcttccattgactgattttctttctgttgggtatatatccagcagtggcattgctggatcatataatagctctatttttatttttttgagaaacctcaaaactgttctccatagtggttgtactaattcacattcccaccaacagtgtacaagggttcccctttctccacatcctcatcattatttgttattgcctgacttttggatgaaagccattttagctggggtgagatgatatctcatgatagttttgatttgcatttatctgatggtcaatgatttgaacacattttcatatgcctgtttgccatttgtatgtcttcttttgagaaatatgtattcaaatcttttgcccatttttaattggattattagatttctttcctatagagttgtttgaattacttatctattctggtttttaatgccttcttgaatgggtagtttgcaaatattttctcccattctgtgggctctctcttcactttgttgattgtttcctttgctatgcagaagctttttaacttgatgtgatcctgtttgttcattttgctttcgttgcctgtgctcatggggtattgctcaataattttttttgcccagacaaatgtcatggagagtttccccagtggtttcttgtagtagtttgcagtagtttcatagtttgaggtcttagatttaaatctttaatctattttgattttatttttgtatgtgatttgagataggggtctagtttcatttttatccattgagccactctgtgccttctgattgtagagtttagtccatttacatttgacgtaaatgttatatttttaagtaaggacttactcctgccattttgttacttgttttctgtttgttttgtggtcttctcttccttctttctttcctttctgtcttcctttcagtggaggtgattttttcagtttcctgctttttattttttgtggaactgttatatgtttttgagtttgaagttaccatgaggcttaaaaatagtatcttatatcccattattttaagctgataacaacttaacacagtttgcataaagaaacaaagacagcaaacagaaagctaatacaaactctataccttaacttcattctcccactctaaaactttttgttgtttctatttatgtcttattgtactttatatgtcttgaaaagttattgtagttattatttctgattggctcatcatttagtttttctacttaagacaagagtagtttacacgtcatagttacagtgttataacattctgtggttttctgtgtacttactactgccagtgagttttgtaccttcagatgattaaattgctcattaatatccttttctttctaattgaagtactccctttagcatttcttctaggacaggtctcgtgttaattaaatccctcaccttttgtttgtctggaaaagtctgtgtttctccttcaagtttgaaggatattttcaccagatatactattctagagtaaaaacttttttttttgtctttcagcacttcaaatatgtcatgccactctcatctggcctgtaaggtttccactgaaaagtctgctgccagatgtactgaaactcccttgtatgctatttgtttcttttctcttgctgcttttaggatcctttctttatcttggacctttgggagtttgattatcaaatgctttggggcagcattcttgggttaaatctgcttggtgttctataaccttcttgtacttgggatattgatatctttctctaggtttgcaaagttctctgttattattgctttgaataaactttctacctgtatctctttttctacctcctctttgacaccaataactcttggatttgcccttttaaggcaattttctagatcctgccagtgtgcttcattgttttttattcttttttcttttgtctcctctgactgtgtattttcaaatagcctgtcttcaagctcacaaattctttcttctgcttgatcagttctgctataaaaagactctgatgcattcttcagtgtgttatttgtacttttcagctccagaatttctacttgattctttttaattatttccatctctttgttaaattcatctgatagaattcttgaatttctttcagtttcctcaacatggctattttgaattctctgtctcacatatctctgtttcttcaggattgatctctgatgtcttatttaattcatttggtgaggtcatgtattcctggatggtcttgatacttgtagatatttttctgcatctaggcattgtatttattgtagtctttacaacctgggcctgtttgtacttgtccttggaaaggctttccagatattttgaaggactcggatgttgtgatctacgttgtatctgctgtagggggccctgcaagcctagtaatgctgtgggtcttgtacacactcatggaggtaccaccttgatggtcttggacaagatctagaaggattctctggattaccaggcagagattctttttctagtccctttactttctcccagagtctctctctttctgttctgacccacataaagctggtgacacactccaccgcaactaggactttgctgggtaagacttgaagccagtacagcacttgcccagggcctgcagtaaccacttcctagctgccatctatatttgctcaaggctctggggctctacaatcagtaggtgagaaagccagccagacccgtgttcttctcttcaggttggcaagtttcccaaggccctgggttggtccagaggtgccatccagaagccagggactagagtaaaaaaccttagaagtctacctagtattgcattgtactgtgactaagctggcattcaaaccacaagacacagtccttcccatgctgtcttccccttttctaaggcaaaggagcctcacctcatggccaccaccaccacaggcccacagggagtactgccagtgtactgttaatattccaaggcccaaggactcttcagtcagcttgtggttaatgctgcctggcctgggactcacccttcaaagcagtgggctcccctctggcccagggcaggcccagaaatgctatccaagagccacatcctggaatcagggaccccaagcccagttggtgctctacctctctgtggctgtacctgaagccagcaagtcacagagtctcacccaaggcccatgacatactaattgggtatcacttctggtttttcagggcccaagggctcttcagttagtaggtgatgaattctctccagatgtcgttgtgaagataaaagaggtttattttcatgaaaacatatatactttaaagcaccttatgaaatgtatgtccattccaccatcaacatttttacctctgttgggaagataattccttttgactccacaataattatttatatctacacatgggaatgtttcttttttatttgtgtggttttggttttaaagcatttaatcattacaagactcctagaattactatatcatgtgctctctgaaggcaaagttcccatctaatttttctattttatctttctacctctaagacctaaaactcaataaatgtgcattaaggcagatatccttgggagaagtgacacagaaactatgtattcatgctctgtgtccattgtacttcactcagggttaagactgccttgatgagggcaagtgtaggaagactctgaggccatctgagagtaagtggtgaagacttaagaagtggggcaggaaacacagcaagagagagttgtcaggaagcagaaaagcagttggcaaaagcaaccactgaaggactggttttacctctaattcttcctggactggggataatcctagagggcttgtctctgtcagatgaacttttggtagcatttcccagaaccatgactcaaaacttgccactgtgttcccatctgggatttggaagataaggtaagaacttggaaagaattcaggggacacttagttaaattgggtcaaaatgtgtccattctccagcctccgtcttggcagtgacacattggaaaatggttccactatgactgaacagccagggaagagtacagcttatttatactctctgttttccactttattttctacaaactatgtcttttagaaataaactatcaatcttgcccagactggagaaaggactgcagcaacaaccctgtttcagtattctggaaaacggtttcccgcagggtaagtaccaagtagtgaaattctagagctttggagaccacagaacttaagacgttactcagtcagtgcttggttttaacacttttggattacaaatacttttaggaatgaaaatataggattcattcctgagaaaaaggttcagatgcacatgccagaaaatttacacatccaattttagaacattcttagagggtccatgggctccagttgcagaatctttgcacgtacccactctgactttggctaccaggaacctggggcttggtttaatcctctgattcaggtattagtcaatcttagatacctgggacagtcgtaacaatctacatgtatagaccccttactatgtggcaggtacggtcctcagatctttacatgaactagtaacttgcatcttcaccagaaccctgtgaagcaggtgccatgagtattgtaaccatttaacacataacgtgaaggtacaagtaaacaaggaatctactaaatgtacagaattagtaagaggcatatgtgggagtttatcccaagctgtctgactccagattcagaatctaggctgggaaaaactcaccactccaccctctacctattttttttaaaaaaattgatacataatagttttacatatttatggggtatatagtgatgtggtgatacatataaggtatagtgatgaaatcggggtaattaacatatctgtcatctcgaacatttatcatttctttgtgttgggagcattgaatatcccccttctggctagctgaaactacatattattaactgtagtcctcctacagtgttattgaacaccagaatttattcctcctatctaactataattttgtatcttttaacaaatctctacctatctcctcctcctcctacttttctaagcctatggtggcctctgttctgccttttacttccataagatcaacttaattttagcttccatatatgagtgagagtatgtagtatttaaccatctgtttctggcttacttcacttaacataatgccctccagttccttccatgttgctgcaaatgacaggaatacttttttttttttttttttttttttttttttgagatggagtcttgctctgtcacccaggctggagtgcaatggtgtgatctcggctccctgcaaccaccacctcctaagttcaagcgattctcctacctcagcctccccagtagctgggactgcaggtgtgggccactatgcccggctaatttttgtattttcagtagagacggagtttcaccatgttggccaggctggtctcaaactcctgacctcaggtgatccgccagccttggcctcccaaggtgctaagactacagccatgggccaccatgcccggctaatttttgtattttctgtagagacagggtttcactatgttggccaggctgtctcaagctcctaacctcaggtgatctacccaccttggcctcccaaagttctgggattacaggggtgagccactgcacctggccaggaatacattttttaattcctgaatacaattccattgtgcacatatacccccatctatttctaactttactcaaagctacctgtgtatatttatttatcttgtaagttgcttcagtgttaagtggacaaggaaacatttcttttcaagtgtgttagggaaaaaaagagaaaggaaggaagaaagaaatgaaagaaaaaggtgtgagtaacaatacactaattataactttcaaaattaaacttagacatctgaggaactggggcaggtggaaatgtatttgttaagtgcatatgtcttagtccatttgtgctgctatcacaaactacctgagacttggtaatttttttaaaacaggagttttattttctcattgtgctggatacttgggaaatccaggattaaggtgccagcagattcaatgtctggtgagggctgctgtctgcttccaaaatggtgccttcttgctgtgtccttacatggcagaggcagaggggctaaaggaacctagctagttccctggagccctttcataagggtgttaatcccattcatgagggcagaacccttagggcccaattatctcctaaaggactcactacttattaccatcacattggtcttaggtatcaacataagaaacacatacattcaaatcatagcagcatatctgtgacaagccttgaagtagttcctctgtcattcccattgagtcatccccataggtagtgtgacaaatccctacattaaaggtgaagaaactaagactcagaagttaagtgactcatccaagttccctgggctaataagttacagacctaagagcctaacctaggcctccctgattccaaagccatgctcttcaattttgttctttgaatctgcttattggttctgtcttttaaatgacaggtttgatcttaactctaggttggtacctagctaaatctctgtcttagggggattcatgtaaaccctggtacgatggaaacagaaaaacagcctggaagttgacataaggagaccatgtttaaacttgggcagattcctttactcattctgatcttctgattcctcatttgtcaaatggaaatcaaaatatacttgttccatagggttactgcaatgtttaaatgagataccaccatcctataacataacccaaaatccacccacttcaaaaataattcattgagtacttactatggacagtgaacattcatgggcactttatagtttttgtttgtttgctttttctgagaatagtttccatttcactactctatggtatgttttaggacagtgctgttgctaaaatcttttaaagccaagtcacattttatatgtatcaagaacctccttgcgttccccactcagtccctggcactaggaatacagaggtgcacgtgattgaaggcgtcctgcccttgtgagctaccagcacctttattttgccaatcactcatggatgtatgtggatggacttcttttttcagacttgtccctttctttttctgataacagaggctgtgtttttttttaatttttaatttttgtgggtaggttaaactcatcattataatacaatacagttggataatgtggagggaatgtaagatgctgtcagagtcagagaaggggacttgagctagtcccaggggttggggaggcctcctggagggagcatatagaacactattttgttcatttcatttttccaaagtctaacaaagattcctgctgaatgtttcttgcatggagaaataagaccctttgctcaagcatatttattcattcacttattcagtcctcctttctctctgtgcttttccaggcctaagggtcccctgttctctcctcaggttcccctcttatggtgttcccatttccctcatccctgaatcatccacctgttcccactaaatgaagcataatgtttacagtgcatgacactgagaaagcactttcatcttccccctctagacattcctcttactcctctggacttctgacttctgaaccactgaaccaccagctctatgaactataacactgaacattgttcacttagagattggagcaactgcttcaagaactctgatatgaagcataatccgtccagtggcttggaataaaaattgtgtagacctgacattcctgggctaaaaccatatgggatatccttccttaaccagctattgctaagtattgttttgaatgaaactgctggaggatggtgattaagtttgcatgatgaatggtgggcatttttttttttaagtttgcagaagctgcctgtgatgtggtccatgtgatgctcaatggatcccgcagtaaaatctttgacaaaaacaggtacacatttattttgcatcctgtttgcaagtatcctgttgcaaatatcacagtgaatatttcatctctagaaagaatatgcttttcatgtttcaggtcagttctgaagattagggccaaaaaaggtaaaaattttgaattccgtggagagagttgtctcctgtcaatgtgtttgtctgatttctcctttgccaaaaattgtctaccaggttctaatggccactgcactgtatctagcccctgctcttaacttttgcaggcctggtgtaattttctcagctttctctcccgttaccctccaccctacccattgctcaccattgttcacaccgttcccccatatgacctgcctcccctgctcccctgctcccttctgtctaaatcttcaccatccatgaagacctgccttgaccctcctctcctccaggaaaattgtgtaccccaattcagtagtaaaactactaccgggaacatcgggaactgtgctgggctcttggccttcactatctttttgcagacattgtcaacaatgtactgtagtggttgaaagcaggtactggcggtcattacatatcatctgtgtgacctcaggcagggcagtcaacctctgtgagcccctgaatatgtaccaaagagttgatggtgatgggaagattaactgagacaacagatgaaaaatgctgagctctgtgcctgacaacagagaaagtgctcaatgagaatcagctattattctcatttgctgatccttgccactgaatctggccacacctgtgccttccttggctgatctccttctatatttacagtttttactatgttgattaccttttcggcctttgttctctaatttttgttctctaatcccacataaggctgactgaaaggaggaagcatatattaatttgccttataaactctaggtgccccaaattaatttttcttctctcctgttttaatatttaattctacaaggaagcatttgtcctttcgtcttctgatcccaatttttttgggtaaaagcattaacatttcagaattttatgatctgatattatggttcaagcacttgaaacaggagtgtcagttgtcagagactaacagggaagagtttaggaatgggattagggcaggcaaccatagtctttcaaagcattgcctctcaaacttcactgagcatgtgaatcacgtggggattgttcaactgcagatcatttcagcaggttatagtggttgaaattctacatttcttttttttttttttttttttttttttgagatggcgtctcgctctgttgcccaggctggagtgcagtgacacggtctccgctcactgcaagctcagcctcccaggttcacgccattctcctccctcagcctcctgaataactgggactacaggcacccaccaccacgcccagctaattttttgtatttttagtagagacggggtttcatagtgttagccaggatggtctcgatcccctggcatcatgatctgcctgcctcggcctcccaaattgctgggattacaggcatgagccaccatgcctggctgaaattctacatttctaatgagttcccaggtgatgttcattaggttggtctaaggaccactcttcaaatagcaaatatttaaagaatcaacattaatgcacaaattaagaattttattttgagaatcttgttaaccgagggtcatgctgaataagaaaaggttattgactgatttgcaatttgatgtgtcaactctaaaggataggtcctagccagtgcctttctgcctgctggttgttgaggggggtgtggatgctttcgtttggggttgatgtttggggttctttgtttcttctattttagcacttttgggagtgtggaagtccataatttgcaaccagagaaggttcagacactagaggcctgggtgatacatggtggaagagaagattccaggtatatcttactactttgtacccaagtgttattttatgaatcagtccacaaaagaatccacagtcacaagcacgcactgggaacaaattgactcaggaaatgaaactacatgaatgtgcatgaatcccaacagcctcttaactttatctccacaaaggatatttaactgcttgacacttcagctctcctgctgacccaggagctcttagaggatttacctctactttacctctttatccaagggccttgtccagggcgtgctacaaaaacaaagagactccaaaaatgtttgtgagatcttgtaattttaatactttcttctttcttccccagagacttatgccaggatcccaccataaaagagctggaatcgattataagcaaaaggaatattcaattttcctgcaagaatatctacaggtaattaatttcttcttgaagaaaaaaatgactgtcttgtcacctgtagaatttccttttttccttagcctcctctgagcttggagggctgtgtgaatctttcttgggccttgatgatgatcacagatggcaacctctggtgatctctgtccctccttccaagccgagtccagaaggtatccaagctagtggccttcacttggctgcctttcctcatccgtctctattgatcccaagtaggacttgcctctaaagctgacacaacctttgatggcatattttttcattcccagtgtgagtggcccagtccagggttcactggcctactaggtttcaggggagcaagggaatgttttgctaagccctttctcccaagttgtaaaatccttgtgacttgacatcattttgcaagtgaagcttccttagttggatctgagtacagatgcctaacacatgacaaggcgtcacacggcagtctaccaaaatctatattttttaaattaaaaaaaaaagtatttacaaaatttttctgataatttgtgtttattagaaaacagtttaaaattacagatagatatatattttttaaagtcacatataattctagtttcaaaactgagacccctcactcatttttaagcagttgtgaccaatggtgtaggtaggtactcattggtagaagcatctttggagatttttccacgtataatagcttggaacaagattgatgcagagaggaaaagctgttcaaaggaggtagaagctgagatgctagaatattgttcctgtttccatgtcactaccttctctcactaaccacatcagaaaagcagaaggatagattctggagactctactgatggcttttgtttcccaaatgacctgaattccccatgagtcaccttgcttctatctggaaacagccagaaaaggccatgagcattctacagcagttagacaggaaaacagaaagaatgaatgaaggagcaactgtaaaagcaatcttgcggcggaggagccaagatggccgaataggaacagctccggtctacagctcccagcgtgagcgacgcagaagacgggtgatttctgcatttccatctgaggtaccgggttcatctcactagggagtgccagacagtgggcgcaggccagtgtgtgtgcacaccgtgcgcgagccgaagcagggcgaggcattgcctcacctgggaagcgcaaggggtcagggagttccctttccgagtcaaagaaaggggtgacggacgcacctggaaaatcgggtcactcccacccgaatattgcgcttttcagaccggcttaagaaacggcgcaccgcgagactatatcccacacctggctcagagggtcctacgcccacggaatctcgctgattgctagcacagcagtctgagatcaaactgcaaggcggcaacgaggctgggggaggggcgcccgccattgcccaggcttgattaggtaaacaaagcagccaggaagctcgaactgggtggagcccaccacagctcaaggaggcctgcctgcctctgtaggctccacctctgggggcagggcacagacaaacaaaaagacagcagtaacctctgcagacttaagtgtccctgtctgacagctttgaagagagcagtggttctcccagcacgcagctggagatctgagaacgggcagactgcctcttcaagtgggtccctgacccctgacccccgagcagcctaactgggaggcaccccccagcaggggcacactgacacctcacatggcagagtattccaacagacctgcagctgagggtcctgtctgttagaaggaaaactaacaaccagaaaggacatctacaccgaaaacccatctgtacatcaccatcatcaaagaccaaaagtagataaaaccacaaagatggggaaaaaacagaacagaaaaactggaaactctaaaacgcagagcgcctctcctcctccaaaggaacgcagttcctcaccagcaacagaacaaagctggatggagaatgattttgacgagctgagagaagaaggcttcagacgatcaaattactctgagctacgggaggacattcaaaccaaaggcaaagaagttgaaaactttgaaaaaaatttagaagaatgtataactagaataaccaatacagagaagtgcttaaaggagctgatggagctgaaaaccaaggctcgagaactacatgaagaatgcagaagcctcaggagccgatgcgatcaactggaagaaagggtatcagcaatggaagatgaaatgaatgaaatgaagcgagaagggaagtttagagaaaaaagaataaaaagaaatgagcaaagcctccaagaaatatgggactatgtgaaaagaccaaatctacgtctgattggtgtacctgaaagtgatgtggagaatggaaccaagttggaaaacactctgcaggatattatccaggagaacttccccaatctagcaaggcaggccaacgttcagattcaggaaatacagagaacgccacaaagatactcctcgagaagagcaactccaagacacataattgtcagattcaccaaagttgaaatgaaggaaaaaatgttaagggcagccagagagaaaggtcaggttaccctcaaaggaaagcccatcagactaacagcggatctctcggcagaaaccctacaagccagaagagagtgggggccaatattcaacattcttaaagaaaagaattttcaacccaaaatttcatatccagccaaactaagcttcataagtgaaggagaaataaaatactttatagacaagcaaatgctgagagattttgtcaccaccaggcctgccctaaaagagctcctgaaggaagagctaaacatggaaaggaacaaccggtaccagccgctgcaaaatcatgccaaaatgtaaagaccatcgagactaggaagaaactgcatcaactaatgagcaaaatcaccagctaacatcataatgacaggatcaaattcacacataacaatattaactttaaatataaatggactaaattctgcaattaaaagacacagactggcaagttggataaagagtcaagacccatcagtgtgctgtattcaggaaacccatctcacgtgcagagacacacataggctcaaaataaaaggatggaggaagatctaccaagccaatggaaaacaaaaaaaggcaggggttgcaatcctagtctctgataaaacagactttaaaccaacaaagatcaaaagagacaaagaaggccattacataatggtaaagggatcaattcaacaagaggagctaactatcctaaatatttatgcacccaatacaggagcacccagattcataaagcaagtcctcagtgacctacaaagagacttagactcccacacattaataatgggagactttaacaccccactgtcaacattagacagatcaacgagacagaaagtcaacaaggatacccaggaattgaactcagctctgcaccaagcagacctaatagacatctacagaactctccaccccaaatcaacagaatatacatttttttcagcaccacaccacacctattccaaaattgaccacatagttggaagtaaagctctcctcagcaaatgtaaaagaacagaaattataacaaactatctctcagaccacagtgcaatcaaactagaactcaggattaagaatctcactcaaagccgctcaactacatggaaactgaacaacctgctcctgaatgactactgggtacataacgaaatgaaggcagaaataaagatgttctttgaaaccaacgagaacaaagacaccacataccagaatctctgggacgcattcaaagcagtgtgtagagggaaatttatagcactaaatgcctacaagagaaagcaggaaagatccaaaattgacaccctaacatcacaattaaaagaactagaaaagcaagagcaaacacattcaaaagctagcagaaggcaagaaataactaaaatcagagcagaactgaaggaaatagagacacaaaaaacccttcaaaaaatcaatgaatccaggagctggttttttgaaaggatcaacaaaattgatagaccgctagcaagactaataaagaaaaaaagagagatgaatcaaatagacacaataaaaaatgataaaggggatatcaccaccgatcccacagaaatacaaactaccatcagagaatactacaaacacctctacgcaaataaactagaaaatctagaagaaatggatacattcctcgacacatacactctcccaagactaaaccaggaagaagttgaatctctgaatagaccaataacaggctctgaaattgtggcaataatcaatagtttaccaaccaaaaagagtccaggaccagatggattcacagccgaattctaccagaggtacaaggaggaactggtaccattccttctgaaactattccaatcaatagaaaaagagggaatcctccctaactcattttatgaggccagcatcattctgataccaaagccgggcagagacacaaccaaaaaagagaattttagaccaatatccttgatgaacattgatgcaaaaatcctcaataaaatactggcaaaccgaatccagcagcacatcaaaaagcttatccaccatgatcaagtgggcttcatccctgggatgcaaggctggttcaatatacgcaaatcaataaatgtaatccagcatataaacagagccaaagacaaaaaccacatgattatctcaatagatgcagaaaaagcctttgacaaaattcaacaacgcttcatgctaaaaactctcaataaattaggtattgatgggacgtatttcaaaataataagagctatctatgacaaacccacagccaatatcatactgaatgggcaaaaactggaagcattccctttgaaaactggcacaagacagggatgccctctctcaccgctcctattcaacatagtgttggaagttctggccagggcaatcaggcaggagaaggaaataaagggtattcaattaggaaaagaggaagtcaaattgtccctgtttgcagacgacatgattgtttatctagaaaaccccatcgtctcagcccaaaatctccttaagctgataagcaacttcagcaaagtctcaggatacaaaatcaatgtacaaaaatcacaagcattcttatacaccaacaacagacaaacagagagccaaatcatgggtgaactcccattcacaattgcttcaaagagaataaaatacctaggaatccaacttacaagggatgtgaaggacctcttcaaggagaactacaaaccactgctcaaggaaataaaagaggacacaaacaaatggaagaactgctcatgggtaggaagaatcaatatcgtgaaaatggccatactgcccaaggtaatttacagattcaatgccatccccatcaagctaccaatgactttcttcacagaattggaaaaaactactttaaagttcatatggaaccaaaaaagagcccgcattgccaagtcaatcctaagccaaaagaacaaagctggaggcatcacactacctgacttcaaactatactacaaggctccagtaaccaaaacagcatggtactggtaccaaaacagagatatagatcaatggaacagaacagagccctcagaaataatgccgcatatctacaactatctgatctttgacaaacctgagaaaaacaagcaatggggaaaggattccctatttaataaatggtgctgggaaaactggctagccatatgtagaaagctgaaactggatcccttccttacaccttatacaaaaatcaattcaagatggattaaagatttaaacgttaaacctaaaaccataaaaaccctagaagaaaacctaggcattaccattcaggacataggcgtgggcaaggacttcatgtccaaaacaccaaaagcaatggcaacaaaagacaaaattgacaaatgggatctaattaaactaaagagcttctgcacagcaaaagaaactaccatcagagtgaacaggcaacctacaacatgggagaaaattttcgcaacctactcatctgacaaagggctaatatccagaatctacaatgaactcaaacaaatttacaagaaaaaaacaaacaaccccatcaaaaagtgggcgaaggacatgaacagacacttctcaaaagaagacatttatgcagccaaaaaacacatgaagaaatgctcatcatcactggccatcagagaaatgcaaatcaaaaccactatgagatatcatctcacaccagttagaatggcaatcattaaaaagtcaggaaacaacaggtgctggagaggatgcggagaaataggaacacttttacactgttggtgggactgtaaactagttcaaccattgtggaagtcagtgtggcgattcctcagggatctagaactagaaataccatttgacccagccatcccattactgggtatataaccaaatgagtataaatcatgctgctataaagacacatgcacacgtatgtttattgcggcactattcacaatagcaaagacttggaaccaacccaaatgtccaacaatgatagactggattaagaaaatgtggcacatatacaccatggaatactatgcagccataaaaaatgatgagttcatatcctttgtagggacatggatgaaattggaaaccatcattctcagtaaactatcgcaagaacaaaaaaccaaacaccgcatattctcactcataggtgggaattgaacaatgagatcacatggacacaggaaggggaatatcacactctggggactgtggtggggtcgggggaggggggagggatagcattgggagatatacctaatgctagatgacacattagtgggtgcagcgcaccagcatggcacatgtatacatatgtaactaacctgcacaatgtgcacatgtaccctaaaacttagagtataataaaaaaaataaaaaataaaaaacaactctcagaagcaaaaaaaaaaaaaaaaaaaaaaaaaaaagcaatcttgcagatatctgacgagtctaagctgttcaaagatatgttgcatggagaaaatagaatagtagaaacctagacaaagactgggaaataaagatggtcttatccccaatactcttttaccttttttgtcttatgaaacattaacctttttctcataaatgaccagaagacctttatattataattcgtcaactcccctcatttgtgtctgctttaggctccaagtgagctcactcattctccatctggaaagaaaatatgggcatggcttccatttggacttgtacagacagtggcccataatgggaaccaggtgacacatcacaagggcaggttctgacacctcttccttccagaagcccaggggtgctggcagctgcttctgaggatctctctcttccttggctcatatttagcaaaatcaaatttaaagaaccccattcctcgctatccaccatccccctattcatgtgccagccactcctattggatcctgttgctttagctaatttttatgaaaataatagtcattcacctgttaggtacttatctaaggtttgtttcaaagcaagtttggtccccttgctgagggtctccagctttttcccagactctgcctctgaccctggattcaacattccctcaggaagcttcggaagagaggaaagcaaattagccacagaagctgtgggggtccgtggccttggttgctgctcctgctgtttttttgaccagcaggtggcatggatagctcccctcccgacatgtcactgcaggagaggagtttatatggatgctaagtggtctgtgcaccttgtcgtcgctaaaaaaggggcttcctccattagcgaattggacgacagatgtatcctacggtctcttgatttccttttttgctttcttgtcatagacctgacaagtttcttcagtgtgtgaaaaatcctgaggattcatcttgcacatctgagatctgagccagtcgctgtggttgttttagctccttgactccttgtggtttatgtcatcatacatgactcagcatacctgctggtgcagagctgaagattttggagggtcctccacaataaggtcaatgccagagacggaagcctttttccccaaagtcttaaaataacttatatcatcagcatacctttattgtgatctatcaatagtcaagaaaaattattgtataagattagaatgaaaattgtatgttaagttacttcactttaattctcatgtgatccttttatgttatttatatattggtaacatcctttctattgaaaaatcaccacaccaaacctctcttattagaacaggcaagtgaagaaaagtgaatgctcaagtttttcagaaagcattacatttccaaatgaatgaccttgttgcatgatgtatttttgtacccttcctacagatagtcaaactataaacttcatggtcatgggtcatgttggtgaaaattattctgtaggatataagctacccacgtacttggtgctttaccccaacccttccaacagtgctgtgaggttggtattatttcattttttagatgagaaaatgggagctcagagaggttatatatttaagttggtgcaaaagtaattgcaagttttgccaccgaaaggaatggcaaaaccacaattatttttgaaccaacctaataatttaccgtaagtcctacatttagtatcaagctagagactgaatttgaactcaactctgtccaactccaaaattcatgtgctttttccttctaggcctttcataccaaactaatagtagtttatattctcttccaacaaatgcatattggattaaattgactagaatggaatctggaatatagttcttctggatggctccaaaacacatgtttttcttcccccgtcttcctcctcctcttcatgctcagtgttttatatatgtagtatacagttaaaatatacttgttgctggtactggcagcttatattttctctcttttttcatggattaaccttgcttgagggctttaacaattgtattactttttcaaagaactaagctttagcttcattgatttttttctatttaattgggttttgctcttctctttagcattggaaacatagaaatgctttctgatttctttgggtagatttacgtattcagcttcttgagatggaagtttagatcactgatccttcagcttgttttcttttttgtatacatagattttaggacgatatattttcccttgagttctgctttagctgcagctcttatgttttgatatgcctctctttattatccttcagttaaaaatatctttcaattcattgttatataaaaatatgtgcctagtttttaacatctggagattttctagttttgaaaaaaacataagccaggcatggtggctcacacctgtatccccagcactttgggaggccgagacgggaggatcgcctgagctcaggagtttttacaccagcctgggaataacagtgagacattatctccaaaaaaattacctgggtatggtgttgtgcacctgtagtcccagctactctggagactgaggtgggaggattgtttgagcttgggaggttgaggctgcagggagctgtgatcacaccactgcactctggcctgagtgacagattgagaccctgtctcaataaaagcaaaaataaagaaaataaaccatatgtgttgaacaaaggattaataaattaatttgagactccttcagggaatgaccacaatttattgaaaatagcctaaatgttggagtcaggcatttctggattcatattttgacatcatgctgtcatcttgaacaaaatgcctaacctttctgaacttcaacttccttgccactcaaataaggattacaaaacttaaaatgtggtaagtactaaagacgacagcaaaaattgagtccagcacagagcttcctaaataagcaagcactcaacagagttggttcctttcttcctcccctgcttgacaatccagtttcccacaggagcctttgtagctgtagccaccatggtcagtccagggattcttcactagccccttctcccctggcagacatccttgtgggagtttagtcttggctcgacatgaggatgggggtttgggaccagttctgagtgagaatcagacttgccccaagttgccattagctccccctgcagaatgtcttcagaatcggggcccggtcagtctcctgggtgacctgctgttttcctcttaagatcctttccactttggttgctgctttcgggactcatcgagtccttgctcaacaggataccccttgaagtggctgcctgggccacatccccttccaaacaagaaatcaaaatattagaaatcaatttttgaaatttcccctaggaagactcatttgagtgttcaagttcagagccagtggagaccttaggggagggtggtcacaaggattttgcacagtgctttagagggtcccagggagccacagaggtggtgaggggctgggtgctcttttctccgtgcatgaccttgtgtgtctatcttcattaccacaatgcctcatctctacctcctttccccctgtagttccaacgtgggtatctttgccatctctggcccgaaggactttctgacctacatgtataaataccccctcacaatatatattacttttcctataagtgacttctctactggattactggttgctcatacacctcatattttactcgtaaatctactactccctgtctgcctactccattctcatttgctgtagaaaattctcttaccatcccaactttcacccaccatcatgcttacccaaaggctgtgggaatgacctgggccctaatgccccttttctaaattcctaaggctcaccattttcctattgtaatggttcttgaccttataatgtttgaggcaccttttcaaatatagtcctttgatttcagactgaatacttgaaaggacacacacacacatacgtaagtgcatatgactgcatacacccacacacacacacgtgcctgtatacagtcatatgatacatacacaaacacacgcacacaagcctgcatacatcatatgccaacagtggggatatgttctgagaaatgcatcattagatgattttgtcattgtgtgaacatcatagagtgtacttacactaacctagatggtctaacctactacacacccaggctacatggtatcacctattcctcctaggctacaagcctgtacagcgtgtgtctgtactaaatgctgtgggcaattttaacctgatggtaaatgtttgtgtatctaaacatatctaaacatagaaaaggtacagtaaacatgcagtattataatcttatgagaccgtcatcatatatgtggtccactgtttgggccatcattggctgaaaagcggttatgcgacacatgactgtatatatactttcctgttacaacaacagtgtctctcaatccacagtaattgcagcatccagtaggtcttactttagccctgagtcaccatttgtgtcaacgtgtttagtgccatgtccacgtctctcatgtaactggcagagctatcaaatattttggcaaaacacattgtttctttggctttgccttggtaactttctgtgccttttgtagctcttgtttggaagaagctcaacccatgtctgcacactgtgatacaagggggacagcatcgacatcgacttacttcttggtgccttattcctccttagaacaattcctaaatctgtaacttaagtttctcaggaagattccatactgcacagaaaactgcttttgtgggtttttaaaaggcaagttgttatatgtgctggatagtttttaagtatgacataaaaattgtataaagtaaaatattaaaatacacctagaatactgtataactttaagtcattttatcaacacattgctaatccagatattttcccgcagtttttctttgaataacagagcaattaatttacttttactatgaagagtcatcattttagtatgtattttaagcaatccaccaagaactcagtaggcagctgagaggtgctgcccagagaagtggtgattagcttggccttagctcacccacacaaagcacaacaggctttgaactattccctaacggggcatttattctttttttttttttttttgtgagacggagtctcgctgtcgcccaggctagagtgcagtggcgcgatctcggctcactgcaggctccaccccctggggttcacgccattctcctgcctcagcctcccaagtagctgggactgcaggcgcccgccatctcgcccggctaattttttgtatttttagtagagacggggtttcaccgtgttagccaggatagggcatttattcttgaacttgattcagagaggcacacattaccattctctaatcagaatgcaagtagcgcaaggcagtggaaactatggaattcggaggcaggtgatgcattgggcgagtttattaacatctgtgactctctagtttgaaatttatttgtaacagacaaaaatgaattaaacaaacaataaaagtataataaagaactgtgctgaataattcttttaaaaggagttgtctctgggcttgaaagaactaagggacatgttcagtgggtggcacattgctgaagacaacaggacttcctacctactgcactacacgattgagtgagttaggtagctggggaaaggatgggtcactgtcctggtgtgtctcagtggtggaataagcgggaatagatgccaacaagagtccagtgctactgtctacaaagacctgaaaatccttactcacacctctttattcttcaacacattgaagaagaatgttgtttgcttttcagtaggagtctcacattcgagaatcacgtgatgacgcatcttttattctctattaaggagactcaccttgagacctcacaggatttaacataatgaaaacaacatgtgtgattatttttttaaaaaaaacttttaagttcaggcatacaggtgcaggcttgttacacaggtaaacttgtgtcatgggggtttgttgtacagattatttcatcacccaggtattaagcctagtacccattagttatttttcctgatcctccccctcctcacaccctccatgctccaataagccccaatgtttgttgtttctcactgtgtcccaagtgttctcatcatttaacgcccacatataagtgagaacatgaggtatttggttttctgttcctgcattagtttgttaaggataacagccttcagccctatccatgtccctgcaaaggacgatcttgtgtgtgattcttaataagtgacataaacatgaaacaacacttaaagacttgatgcaaaagacctggcagggtggctcgtgcctgtaatcccaacattttgggaggtcgagaacggaggattgcttgagcccaggagttcgagaccagcctgggcaacataatgagatctcatctctgaaaaaaactaaacaaaaattaaccaggcatggtggcatgttcctgtagtcccaactacttgagaggctgaggtgagaggattgcttgagcccaggagatcaaggctacagtgagctgagattgtgccactgcactccagcctggacaatagaaatttagttgctgtctcaaaacaaacaaacaaacaaaacaaaaaacaaaaaaacttgatgcaaaatgccagcctgcagaaaagagaaaaccaatgtttattgtacaaggtacttcacacattgtatcagcctgtgctctcagctgcaacaacagaacaccactctggctgtgtattagggttctctagagggacagagctaaagacagatagatatatgaaagggagtttattaaggtgtattgacttgcatgatcacaaggtgaagtcccacaataggccgtctgcaagctgaggagcaaggaaaccagtccgagtcccaaaatctcaaaagtagggaagccagcagtgcagccttcagtctgtggccaaaggcctgagagcccctgacaatccactggtgtaagtccatgagtccaaaagctgaagaacttggaatccgatgttcgggagcaggaagcatccatcatgggagaaagatggaagccagaagactcagccagtctagtcctcccacgttcttctgcctgcttttatcctagctgcactgatagctgattagatggtgctcacctagattgactgtgggtctgcctctccgagtccactgactcaaatgttaatctcccttggcaacaccctcacaaacacacccaggaacaatactttgcatccttcagtccaatcaagttgacactcaaccatcacaggctgaaagtgaattctctaaaaactatcaagagcttatagattgtctgggagggcgagaaaatagtttggaagccacttagccaagaacaacactccagattactctactggcttgtcaggtagaaaagttgccgcttgccctatggacacttggctgtcgctctatcactgccagaacacagacatggctatttctgggaacagaagtaatgaaagagaatggtggatggtgcatggcacctgctttccttcctcaccagccacagattcacggttgcacagatacattcagtgtgtagggcctgatacaggtaaaatgcttaggacagagctcagtttctctgtctgtaaaatgggagtgataagagtgtctatcattttgggttgttttgagcattaagtaaggtgatatgtgcaaaatttttaggataatgcttaatacatatgaagaactgtatcaatgttaggatttttatttttttatttttattttattttatttttgagactgtttttattccggaggaaattccttgacaagcctacctagtttagatgctgagaccctgagacctaggggacaatggagaagagggtagagaatggctctcttgccaaccaacaggatcagctatagtctctcacaagctttgaatcattctagatgattagaactttcccacctaagagagaaatgggccagatacctttcactaagagctggcccatcccaagctggaggttgacaaaaatgcagcaatagactccactgctcccaaatctaagaagttcaaatgtataaatttcatccttcaagctgatcaagagttcaacagcctcccttagcattgccagttcaagcccctgctctcctgaccaggtacttactgctctgatgatggttaaggcacgcagccttccttggtgcaacgaagccagaagacaagatgtgctgggagtagaaatcttctccctgtggaatcagtgagctgaaagaacattgagaaagcaggagagctaagaagaaatgggacagctatctctgaccttctgcacaagaacaaatctcccgttgtgaataatatttaataattggttcagttttcccagccttgccttccagggaattttcctgcactggtagaataatcagatacaagttggagggaaagatgccctgtgggagctgctgctaagtcccagattcttcttagacgctcagaatttgatgactttggcgctgggccacagaagtcatgagcttctccaggcacagcttgtttggcctggtgatgtgagaggaaggaagcaagctgggatctcatcaggtgtccttcctgctgtcagccttttagaacacgggtgactctgtgctatcagatgggattatttttaaaatgtatttttttgtttttgtttttgttttgagacggagtctcactctgtagccaggctggagggcagtggcgtgatctcggctcactgcaacctccgcctcccaggttccagcgattctcctgcctcagcctcctgagtagctaggactacaggcacgcaccaccatgtccagctaatttttgtatttttagtagagacaaggtttcaccatgttggccaggatggtctccatctcctgaccttgtgatccgcccccctcggcctcccaaaatactgggattacaggcgtgagccactgcgcccggcctgttgttttctaagtgtcactcattaccatgaacatgtcaaatacttccacagtaaaagtaacaaaatagacatttctgtaataatttattacagaatcatgaaagaaccatggaacacaatgatggcacatcagtggctcatctcctttacttgacaagtgaagatactaagtccttctggggttgtggaaggtgtgtggagttgtgagcaatagtttaggagtcaaggttttctccttccatgtctttctttcctatcaaaaagcctaagaatccacaaacaggtgtggtggagattgctaactgttgcctagtatgtgttcttttcttctttttttaaaaaaaataaacagtatttccccatctgccatttttaatcagggcatgacttcacggctagagaacagatcccagctctgcagctggctctggccaatagggtatgaatggagatgattaatgcaattgcctagtcaccttagaaacagccacttgctctaaattttcattttttttaattatactttaagttctagggtacatgtgcgtaacgtgcaggtttgttacatatgtatacatgtgccatgttgatatgctgcacccattaactcgtcatttacattaggtatttctcctaatgctatccctccctccctccctcccccgaccccacgacaggccccattgtgtgatgttccccaccctgtgtccatgtgttctcattgttcgattcccacctataagtgagaacatgtggtttttggttttctgtccttgtgatagtttgctcagaatgatggtttccagcttcatccatgtccctacaaaggacatgaactcgtccttttttatggctgcacagtattccatggtgtatatgtgccacattttcttgatccagtctatcatcaatggactaaattttcacttttatctcctttactttgctgaaaaacaatgaaatttcagcagcagccttggacttagaaaatggaagccataagcagagggtaccaaactctagaaaaagatacttctctcttcctctcttcctctgatctagtttcacccagaatctcatttccatgatggctagacctggtctttttcttcattgctttatcctcaatcccagacacagagcagaaactcagtcagtatttgctctcagggcttttgtctccataatgccttctttaatcctcaccgctgtagctcagtttctttgtccagacttggctttgctggccactttagcctcactattaaataattgacctactgattatttgatcaccagtattagctgatccttttctaggtgcaaggtgctggtgacagagtattgacagaaacaggcatgggctactgccgtggagcagatggcccactccctgtgtattcaagggggaatctctacttcagcctgaacttggtaaaagtcatttcccccatacccctttccagctgcccactgtgttgtctggaaaactctggtcttttaggaggactgagaatgagatggttaggactgtcaatgacacaaacatgccccatgagcacaaagtacaatttggggtgatgtgagagggatgatgaaagcttccccaaacaggggagattgagagttttcctttaaaatgtttttatttttaaccaagttaccatttctttgatgtaagcaatacagataataaaaaataaagacaaaatcattgaaatatatcagtgctatactttctactcattgataatcttaccacccaggttaccagtggttaccactgataacatcttatgtatatattgtacacttttcatataaatcatatttttcatagaaaaacaatcctaaaattcatatggaacaaaaaaagagaactaaatagccaaagcaatcctgagcaaaaagaacaaagctggaggcatcacactacttcacttcaaaatatattacaaggcttatagtaaccaaaacaacatggtggtatggctcacgcctgtaatcccatcactttgggaggccgaggtaggtggatcatgaggtcaagatatcaagaccatccttgccaacatggtgaaaccccatctctactaaacatacaaaaattagctgggtgtggcagtgcaggcctgtagtc

SEQ ID NO: 1256 - DNA, 1164 bp, Homo sapiens
atggccaactgcgagttcagcccggtgtccggggacaaaccctgctgccggctctctaggagagcccaactctgtcttggcgtcagtatcctggtcctgatcctcgtcgtggtgctcgcggtggtcgtcccgaggtggcgccagcagtggagcggtccgggcaccaccaagcgctttcccgagaccgtcctggcgcgatgcgtcaagtacactgaaattcatcctgagatgagacatgtagactgccaaagtgtatgggatgctttcaagggtgcatttatttcaaaacatccttgcaacattactgaagaagactatcagccactaatgaagttgggaactcagaccgtaccttgcaacaagattcttctttggagcagaataaaagatctggcccatcagttcacacaggtccagcgggacatgttcaccctggaggacacgctgctaggctaccttgctgatgacctcacatggtgtggtgaattcaacacttccaaaataaactatcaatcttgcccagactggagaaaggactgcagcaacaaccctgtttcagtattctggaaaacggtttcccgcaggtttgcagaagctgcctgtgatgtggtccatgtgatgctcaatggatcccgcagtaaaatctttgacaaaaacagcacttttgggagtgtggaagtccataatttgcaaccagagaaggttcagacactagaggcctgggtgatacatggtggaagagaagattccagagacttatgccaggatcccaccataaaagagctggaatcgattataagcaaaaggaatattcaattttcctgcaagaatatctacagacctgacaagtttcttcagtgtgtgaaaaatcctgaggattcatcttgcacatctgagatctgagccagtcgctgtggttgttttagctccttgactccttgtggtttatgtcatcatacatgactcagcatacctgctggtgcagagctgaagattttggagggtcctccacaataaggtcaatgccagagacggaagcctttttccccaaagtcttaaaataacttatatcatcagcatacctttattgtgatctatcaatagtcaagaaaaattattgtataagattagaatgaaaattgtatgttaagttacttcacttta

SEQ ID NO: 1257 - protein, 300 aa, Homo sapiens
MANCEFSPVSGDKPCCRLSRRAQLCLGVSILVLILVVVLAVVVPRWRQQWSGPGTTKRFPETVLARCVKYTEIHPEMRHVDCQSVWDAFKGAFISKHPCNITEEDYQPLMKLGTQTVPCNKILLWSRIKDLAHQFTQVQRDMFTLEDTLLGYLADDLTWCGEFNTSKINYQSCPDWRKDCSNNPVSVFWKTVSRRFAEAACDVVHVMLNGSRSKIFDKNSTFGSVEVHNLQPEKVQTLEAWVIHGGREDSRDLCQDPTIKELESIISKRNIQFSCKNIYRPDKFLQCVKNPEDSSCTSEI

SEQ ID NO: 1258 - DNA, 65952 bp, Mus musculus
  misc_feature (1)...(65952): n = A,T,C or G
tttgcttctaagtgacaaactcatgataatattaatatcaattttccatagagccatcatggggaagaattcgataagatattatctttgctaatgattctaggtgtgttttttttttttttacaatatctatgtatactgtagtgtcttcagacacaccagaagagggtgtcagatctcattacgggtgattgtgagccactatgtggttgctgggatttgaactcaggaccttcagaagagcagtcagtgcttctaactgctggaccatctctccagcccttattttggtctaaagtatttgtttgtctgttcattttagtcaggtctctatcttttttggctgacctggaactctctatgtagaccagtctggcctcaaacttacagagatctatctgtctttgcatccttggggctaggatttaagacacatgccaccatgctcagcccttaacattgtttttttttttttttttttattgttttgtgtggtttttgtttgtttgtttgtttatttttgtgagtgagggtggtgcatgcaagctactacaataatagtttctggaagttcgagggcaacttgttggttctgtccaagtcatagacttgattgatatagcaagcccctttgctggctgggctatctcgcagcagccactctagaaggaagtgtatgattactgccttccacccagctccagaatctggaattttgctcaagtgttccttccttgaggagccccactctggaaaagatgacaccataggtagtttttcttagcatcatggaccgagtgaagctcccacgacttcgggtggtttcatagccaaggctgcggcagagcctagcagagggagggctggaagttctcatcgctctctcatccagcactgagatctcaccaactttccttagcgtacggaggatgactccaaacagtttcaccttgaggtgtaacctcaggtttgctgagggctaacatcgaactggacggtctgctaggagcgaggcttaggcacgggtgggtagatgtgactaaattctctctggaagattggtttcaagcaacgggttgtgaacgcgttagggtgaatttagattctgacctggcctcttgtgccctctagtggtctaaaacctcagaacttgtcactcaaccaaggttgttcccgcccccccccccccccatggctaaatcgctataaccttttagccatctgttgcatagtgaattcagttcataactacgcttacaacacagtaaagcaattaactaaacacacacaataagagacctgacacatcttgtggggtctttgaaaggtcttcggtgtcttattttgtggtgtgcaaacccaataagctgtaagtccttagtggataattgaaacgatgctcgaatcagaggcagtccctctctcattgtcagtctgtgaaagattagctcgcgaagaagaacaacagcatgcaggcctgttatctggtgagatagtgccactccccgtgatgacggtaaagcctcagatttgagggagccaccggtttaaagtctcagttttgttcagattccaagatagcagccaacctggaggtgcgtgtgggggttatctcttgaacaatgtcagcttcttagaggagtgtgttcaatatcataacatcacagtcctttgggggcgctgcaatcctttttcaggacggagattacagcgctgtctccacactaccataaacaggcacacccatgtaacctacaagctatgaatgacttaagaacaagagcaaatgtagctctctctctctctctctctcacacacacacacacaaaagagagagagagagagagagagagagagagagagagagagagagagagagaatgtgtgtagagctcacgatgttggagctttgagcatgctgggtaaacaccctaccatcgagtttacccctacctcgaaagcagcacctagccccgggattgctcagagctctagctatcaccttcaaggaaaattttgtaactctggttgcccatggtggcttcaagcacctggtggcctcatagtgctgttcacacctgctgtttagttagggcctagtttgttttctgtctgtctccccagcccaaagctaagcctcggtatggcagctgtctgtccatgacagcatcattgagtctatcacagttctcacccaggaggtgttaaataagcatttgccaacttcaacagccccttggggtagatgctggaggaggcaggccaaaggcaagggtgatttccattcttatactaagtggcacagaaaggcaggtgcttgaagactcagaggcagccactcagaaggctgagctgtgcacccacagaaaggagcgagctctttgcatctctccagctcccactaccctttcaaagaaagtaaatgccttgaggttctagagcggctgttagaaaagactgcggctgtctggctgtctgtgaagacagagaaggatggttgtgcctgtaaagctgactgacggtgtgactctgaggctggcagagcccttattaagcgtgcagagactctgggttagaacccagcacctcataaacaacaagcaaactggaactgctttttgatcctgttacatgcctgtagactcacagctctacttaggagtctaaagaaggctgcttgagctaaggaaccaaagcagcagcagcaggagagagagagagagagagagagaaagagagagagagagagagagagagagagagagagagagagagagagagagagagagattatggacattatgttatctcttctgcttacttactttccaaagataaagatgcatcggcacaatggtgtgtgcctggtgatctctggccttaggaggtcactgaaatcagaagttggaggtcagtctggtgtactactaagcccctgtccaaggaaggaaaagaaaagaaaagaaaagaaaaggagaggagaggagaggagaggagaggagaggagaggagaggagaggagaggagaggagaggagaggagaggagaggagaggaaaggaaaggaaaggaaaggaaaggaaaggaaaggaaaggaaaggaaaggaaaggaaaggaaagggaaaagaaaagaagagaaaagagaagtcaaaccagcaaacaactcctcccacttaaacaaccacaagggaaccagaacagagaaaagaaagacagtgtggaccagcagagggccagcaagcatgatctcaaagctgtaaaactgcagaaagcttgactgagcacagggcagagcagcatcctgggccaggcctttttgtggggctgcagcgctctcatctccagttatttttgtttgttttttgagtgaatgagtgaggttgtatctggagttacagtgagtaaatgtcttagcggttaggatcaagtggtgctgcaacagaaaactccagaaggaggttttgttattgttgttgttttgtttttgtttttgtttttgtttttttgtttgtttttttgtttttttggttttttttgagacagggtttctctttatagccctagctgtcctggaactcactttgtagaccaggctggcctcgaactcagaaatctgcctgcctctgcctcccgagtgctgggattaaaggtgtgcgcagaaggagggtcttaagatgtttgtgtctgccacattttaggtctgggtgggcttggggctttaacagtcaagggtccttctaatttactgtaccatagaggtctgttcaaattctcaaggtggcctcagtccatggagatttggaaaccttgagtcacatttttgttttgttttgtttttcacaggcaggaaaaaaaaaaatctgagtaaagtgtaccatctactttaaaggacacccaatttcactctcaacacaccctattggctgtaactgttcttcaggaccagatctaactggaagagaccttgaaaagaagataggaggaaacacacaaacacctgaaccgccagaaactattactggggaagagaaaaaggaggttactagagaaaaatatgcaacctttgttcctggaaccaggcatctaactttctatcctagaaagatagataacctattctgtccctccagggggtgggtgtggcagtcagaaagctagaactcagtaattttaggatgaagatctcataaaaccctgctgtgggccagtgggtgatcaaatgatatgtttacatttttattttcagatttacccttaaatgtccatttaaaaataggtgtgaaggagaagcaatctcattttccagttatgtaatagctaacgtgttcctatttcatagaattgtcagttactaacagataagtccagctgggactttatctgaacctgggtaggaagtacagacttcagtcatattcaaatgatatctcattgtctggatcttgaatattcaggagataaagattcttggttcttcctgtatcttcttagaaatagaattccacctccccaggattgtccaaaattctaccttagattttcctgtaatgttattttgtctcctaagctttcttaaatatatcctgtgtaaatgtgacttcatctgggctgggggctagagaaggggtttagaggttaggagtagtggctgctcttccagagggcccaggttcaagtcccagcactcaccaggtgtattgtaaccatctgtaattccagttccgggggtgggggtggggatccgatgctttcttctggcctctgtctgcaccaggcatgcaggtagtgcatgcagcagataaaacttccatacacataaaaataaagaaaatctttttaaaaactgtcttcatcatgttccttctcaaatttgcttctggctgacccctccccagctgaataaaaaggtaccaggtgacctaagccagggtgacccctccctcaggtctcacacccagccagtgagtgcaatgcctgcgacttgctctctgaaggttctcactgccagaggtatttcctctttgctggcttgatatggtagcctccctcaccctcagctctgtttcagcagtccctcctccaccaatctgacatctatcaatttcccccatcaatctgtctatagaataagaccagtattcatttatggttttgttgttttgttttgttttgttttgtttttatcgaggcagggtttctctgtgtagccctgtctgtcctggaactcactctgtaaaccaggctggccttgaactcagaaatctgcctgcctctgcctcccaagtgctggtattaaaggcttgcgccaccactgcccggctcatttatgttttattcacccattatctatctatctatctatctatctatctatctatctatctatctatctatctacatatctattatctatctacctatcattatctctatcaagacagtctcctgtaacccaggctggcctcaaacttgctgtgaggtagaggtttgcctcaaacccatgatggtccttagtctacagagggctgttttgcagctgtgtccagcctagaaaccttctaagatctggggtctttgttcatttccagatggactcttgtgatctccagccattccatgcttcttcagctgaacccccttgagattcctccttgtgtggattgccattccttttaggagctcagagagcttgttcctttccacagggaagccctgcccaccatccttttggtattcagcggctgggtatgggtttatgagagtagcttcagcaggcctctactgttctcttaatcctgggaaggcagagttgaaaccttcccacttggcacagatctggaggtatcttctggcttagtaagactccattgtaaagtgtaggagttataggatatacatttgagtgtatttattttggattttttccccttcaatccaaagagccgttcgactggtttcttcgtttcacaggcgttgtctgcccaacgctcaaacaaacaaacaaacaaacaaacaacaggacacctcacaagaccctgctactctcctggggcttgttgaggacaaggctctctcttcagaggcggctgacctacgcagagccagccctcctccgaagccacagctgtgagctgggaagctggatggcggaggcccttaataaagagcagacctcccaatcgccttccctcccccacctctcacatggcgtttcaaattaaaagttaactaaaaaaacgaaggtcgaaggagatggagagtgtagtagggccccgggatcactagaaggaggaggaggctggtctctctgcagaagaagagggaatcggacgaccagatcccccgcggtccggtccagccacagctattcagagagcagaggaggatagggccctcctcgtctaggacgtaccacggagacaagctcttcaattagggccatcaccggctgttgtattaggaaccctagagagaatgcccggggctgtggactcaggcaactgctttccactaccccctggaaatcccggggggccctgtaagctagccaccgcccgctgaggaggtaggcgacaagtcgtggagagagggtaactggttatactagtcctctggattctgcagagcgcctttttctcttcttgcgagagtgggctacccctcagctctggctgcttcagagttggggtggagccctgctccatctctccgcagggactccaacatctggttgccgcatctccagcctgctccaggctcccccagccctgggaggaacctcctcccgacgcaatcaggagttaaaggggcagtcaaaggctttttcttttgctctagaccaaatgccccgttattttcaaacaagaaaccagacacacacacccgccccttgcatctcgacttgcccgcggcgtctttatttgaaagaaattaacaagtttgtttgaatgtgaattttcacaggtaacggctttggtggttgtaactggtcttcaacagaagggcttgaattctccaaggatagtagaactagtgggcagtgccagcgagcaatgagaaaggctaggcgttggtgccggacgttctgattctgggatgcaaggcagaatttattttctgtcagtgaccattttgatgtgattatcaaaagttcacggggaccttctcttgaaggttaaatcatctatagcagttagcgtctcttccttctcctgtactctattcctggtcgcccccaaggcatggggcataaggccagggtatgattccccaaagttcccaacctcgggcgagttgggcctcctccggtctcaactgctgggaaaacctcgttcttaactccagggaaaaagatccaaagggttgacaaccacaatctgaatgcaggctgggttcttgacacactaacccaagcagaaagcgattccgttaggctcaccaagtgacctggtccccccccccccccccccccgacatcagggacagaagttcagaaggggagaaaagaccttggctaggcactggcacttgccttcttcggccccgagaccacccaggacccggggtgttgagggggcaatctggaaggattttagaacagggcaagaactgggctggccccctccccctgacaccctgggttgagtgacgggcacagaccggacctttccttcagcccccagagagtggagggcggaaaatgcgattcaaacccgcctatgagcagtgggagcagtgggcgggggcaggacctggtttcagaaaccaaccgcttgagctcccaagcctcctgccctgaggtggctccagaccactgcgtttattttgcttttgcaggcaaggcagatgctttgctgggtcccgactcagcgagatctttgcccaaccatttgcttgcctgctccaccccctactggggcactatcccgggagtcagctctccaggcctttaaaccttagggaatgtcacacatggaaacctttagcaaatgtttgttaatgatcataacaaaggcatcatttaaattaggcaggtaattactaccagaagagcaactgggtgctcgatactcatccttttctcccctttaaactcccgaggaattactgtctcaggatacccgagccggcccgcttttcggactcctttaaaacggctctgaaatgaactgtgaagttaccatttgtgggaggagaacgcaggggccctgcttgaggcaggtagtgggattagagctggtagggtgttccttgcaaagcaggctctcctctgcagacgctcagccccaaactcaccccctccttgggtacctgctacaaaaacctaaatcttgacttgcttttaacaacagatgaaagcccccccaacccctcgctccgtgtgtgtgtgtgtgtgtgtgtgtgtgtgtgtgcaagcctgttcgcagaccttaccatcctgttcattatctacaaacattacggtatcctgctagcattccgaacaaggggctgttcatacatttcgccttcaacggtttcctgaaggaacatgtggaagtaatagtgagcagggcagtcacccgagctgaagatacaccagaggcgggcgtgcagaagggcggaggagaattggggctctcagcccagctccaggcatcctcttcccgagcctgatatccccacggtcggtcctgtcccatttagggacagcactcggcatttcggggaaacctctgtgatttacgccagagcctcaggtccactatagtggtgaaataaccgatggttattcgacgttttgttatcaacctggtcaccttgtccattttaattttgatgtgtgagatggnnnnnnnnnnnnnnnnnnnnaccccccccccccacacacacacaccaaaagcattcaaaaatagagcgcaagtcgaaggccctcccttcccccacccgctccgggaagtcccgcttcgcccaggtttggttcctggagtgtcagcgccccctttccctcgccagcaggatcgccgtgtcccaactgtctctcgctgggtgtcttgggttccctggtttgtggctcaaacgtcctgaaagctttcctagggtacgtcgcgtgcgacccactcggaagggtggaatttaggaggataaaaatccttctgccatcaagatgcagagggcaggcatttggtagtcacgcctagcctgagcgttttcatatgaagatagaagaagcgaggaccagataacccccgaaaacaaaggcaggaccagataagtggctccgaagggataaaggtcgttctttccttcttccggagaacatcccaaaggtacgccgagcaaccgttatttgcacaccgcctcacaatccagcctttcaaaaacccatcatcttcctattagactccacagtttcctaatcccattaaaggattagcaactacacggcactttcccttaagacccccagttcaaaacgacgcagccgcgttagaatttctccccagggccatatttctagcgaggcccagactgtctatagaaaggataatttgaattctagatttatattcgttttagaaatgagcagcaattttacgtgtattttcttttcgaagagaatacaaaacaatagcacccccacccccaaattgggaagtcaactcattttggaaatgatggctgtttgtagtttcctgaaacctctttcccggcagaacgtcaacacctcccccttcggccccccaccccaccccatctggtttgctcccccctcctcgttgttgttgaagtctgggggttgggactggcccccctgattgcataagagcaaaaagcaaagaagaggtcttgagcctgagagagtcagagagcaaggagtcctagggaaacttttattttgaagagaccaagggggggggggacttcatttcctgacagctatttactttaagcaaatgattagtttttggaggacggactataacattgaatcaattacaaaatgcgggttttgagcccattactgttggagcttgagggagagaaacaaacggaggagctgcggggaaggactggaagcttggggcttacttttcactccgggtatcggattttctttgcaaattgacatagaaggagaaggtaagggagaggaaaaagtgacttttgtttctcaagaaggtccctgatcataacttggggctgcaagaagctaagtaacttcaaattttgggcaacgaggaaaacaaaaacaaaacagctgagttcagtggtgtgtccagaaagtaacttattctgaataaacttcactggaatggggggtgtgggggggtaaccattagagagtcaaagataaaaaaaaaaaaagaaaaagaaaaagaaaatgaaaaaaaatccagacctatttttaaaagcaatgtttttttttttttccctacacaatcctatagccttccaaagaaattgttaggcttacatttttgaggttttcctccagggtgggggtggcgttcgtgcttactgggacgaacaccaagtaacattgggggggtggaagccgcggcgcttggcctcttggcagtgggtcacggaagaggacaggtttttaatgagtattttcattcgtcgcccgcggtttggcgggactacgctgtagcgggtggtgcggcgcgaagcttggggagggggcgcaccaggagaagtgtgtgtgtggaggggaaaggggcgccgagtggggcgcgggaaagcgctaagaaaaaagggaggtgtgaagggctcggctggaggaggtcggacctcggatgccggccgggcacactcggcgccagtcgagccctcgtaattactggacggcgctgctgttggaaacatctggggccagacttgagcgcggcggtggcggctgcagcaccgtgagaggggcgcgcgggcgaggggcgcagctccaagggttccggagagattggagcgaattacttgggtgctagaagcctcgggcggaatccgcagtgcgctgggatcgtgcgcctctcactccagcgacggaggcagcggcggcagcggcggcgcggacgagcgatctggaataatgacaaacacatttggcctcgagtgaagaagtcgtcctggcctcgcattccagcaactgggatttgaggaatttcaaactgcactccgaggggccctcattgtgctccgtagtccccacccccactcggctcacttgcgtctccagtggagtcttttctgcacggccgggggttgggggggcctggctcttgcttagtcctggccgcaggcagcaaagaggcaagatccctggctaggagctgacctcttgtgaagaagtcaggacatctctgaaaggacagacgtgggtgcaggtaagcagaaatgtaagaggccaaccaccctcgcctcctgcctacggaactctgggtgcttctctgccctgggatgatggatgcgaggcactggtcgcctgaacgcaacctttccagtgccccccccccccaactttcctcccaacgctcagtatcctgcaaaactcaggggcggtctccgcgcagccttccctccttcaccgttattcccttggaaatcagtttatacatgtgagattaacttccctcgagcagggccgggaaagcaggaagcgatctcttggctttgaagcttctgaggtcggcgattctttctgtttggaaggcgtgtggggcagtctgcagagtaaggcagtatgactcggccctggtctgcagcaggaccaagccagagcctcgcagccaggtgtgcaggagttgccagtgacttggcgaccagccttggcgagaaaggaagtgttggcctgtttgtctgctgtggggagtccttgcagaacccgcgcttagaaactcccaggtctgctaagacctctagaagacccggagggtgtgcatgggggaacccaagctggggagggggcgtgggtggcacttttaaaagtctgggctgcccagcgtcggacagagctgcccagaaaagccccaggctgggcggtgtgggaaacggctttttggcttcgtggcggaattgctcaatgttttggactgaattgcttctcctgaatggtttcggatcagtcttaggcagccttgaggagccggaggaggcctctagtgtaaacccacactgtggtctgcagctgtacagccccagatttaacacccaaagtctcagaagaggctcggggctcagggcgctcctcgggcgcacctcttctgccttcgcactggagtttacataacctctcttaggctcggattttcccctgaccaaggctttccatctcatccttcctctcgtcctctttctttgcaaattcctcttgatgaggactccttcgatttcccaacaggagtgtgtgtgtgtgtgtgtgtgtgtgtgtgtgtgtgtgtgtgtgtgtgacacaccaattaatttgtcgccgtggtcagttcctgcttaggaacccttgcaaaagtcctgttttgggttgtctctagtacagctgggtttctaaagctcgcgggagagaaagaaagaaagagaacacagtccaactccactgtttattgccccggatcccttcttttgctggagtctgcagacccgcagggttcagactcagaacctggcctcccaattctgggcccaggggcttctactttcttcctgggcgcgggctggggagagatgcagggggaggggcttcaggctgcaaacgcgtcaggcgccgaagctggcgggcgggatttctgcctcctggggacaggacctaggctgcgcgggacctggggacgtggtgaccatccttctgcctggtgacctcgaggggtgggatccccctcgggccttcagtgagtagcatccaggttaaaggttgctgactggaaagctggataggtgactcaaaggtgagaggctcagcgacagtctggccgctgatggttgggttggccggaggcatcagcattgaggaggagaaggagaagggggagaagannnnnnnnnnnnnnnnnnnnacacacacggagagagtgagggagaggcagagagacggagacacacagagacaggcagagagacaggcagacacagagagacacccagagagaaggggtggtcgggatcccgagcgtgctagcgcggaacctcagagagaatcggccccagtgcgcgcagcgctgtaggggacccggagcctgagctttgagcgacgccggagccagcgggtaagatcagcggggttgccgcgccctctagtggctcccgcagcgcgacccttgtcccagtagccctgggcggtcgagcggtccccagccgggagcccagtgcgcctggaatttgggctcacctgggtcgctcttgagttttcctgcgggcactgcgttggcgcagaggcgttgggtggacaagagtgggctgagggtccgggtttgagctggagaattggggcgtcttaatttagcagaaggtgggtggaggcggtggaattccggatccagggagatcttgggggacagtagccggcgtgtgcgctccaggccggctcaagcttccttggcctgttgctgtcttagaccccgcgttaccgagcaatggaaatagtcctttctaaccaactgggctgcagggaccccgcggggggcgggtttacgagcagcgagaacagagtggcagggaaaggcgtcgtggtctctcttggcagggtctaggtagccttcatgcttggagaggtggaaagtcaaagggtgttgtttcccctaaacccaagtgaccagttctgcaacatctttgagacctggtccacagcgctatcttcctggctctcaaggcacggctgtgtcttggtccctctttgggcagtggtgatgataattatgctgatggtgacgatggcggtatgtttgttcctcagtgaagtctctggaggtccccaaagaaatttagcattttagataggagttttgtcatttcttcttccacgcctaggagctcaactacaagtcatcacaagacctaaaagtaaagattaacctacgatttttttttaaagttgggacattttaaaatcagaactggtttcaatggcgcctgcagctcagagacaacaggacactggttcttgaaccaacactgccatctgctgtctactctgaggaactgcatatgcctctgagagggcttggcaaattccaagcaaatattggnnnnnnnnnnnnnnnnnnnnnnnnnnnnnnnnnnnnnnnnnnnnnnnnnnnnnnnnnnnnnnnnnnnnnnnnnnnnnnnnnnnnnnnnnnnnnnnnnnnnnnnnnnnnnnnnnnnnnnnnnnnnnnnnnnnnnnnnnnnnnnnnnnnnnnnnnnnnnnnnnnnnnnnnnnnnnnnnnnnnnnnnnnnnnnnnnnnnnnnnnnnnnnnnnnnnnnnnnnnnnnnnnnnnnnnnnnnnnnnnnnnnnnnnnnnnnnnnnnnnnnnnnnnnnnnnnnnnnnnnnnnnnnnnnnnnnnnnnnnnnnnnnnnnnnnnnnnnnnnnnnnnnnnnnnnnnnnnnnnnnnnnnnnnnnnnnnnnnnnnnnnnnnnnnnnnnnnnnnnnnnnnnnnnnnnnnnnnnnnnnnnnnnnnnnnnnnnnnnnnnnnnnnnnnnnnnnnnnnnnnnnnnnnnnnnnnnnnnnnnnnnnnnnnnnnnnnnnnnnnnnnnnnnnnnnnnnnnnnnnnnnnnnnnnnnnnnnnnnnnnnnnnnnnnnnnnnnnnnnnnnnnnnnnnnnnnnnnnnnnnnnnnnnnnnnnnnnnnnnnnnnnnnnnnnnnnnnnnnnnnnnnnnnnnnnnnnnnnnnnnnnnnnnnnnnnnnnnnnnnnnnnnnnnnnnnnnnnnnnnnnnnnnnnnnnnnnnnnnnnnnnnnnnnnnnnnnnnnnnnnnnnnnnnnnnnnnnnnnnnnnnnnnnnnnnnnnnnnnnnnnnnnnnnnnnnnnnnnnnnnnnnnnnnnnnnnnnnnnnnnnnnnnnnnnnnnnnnnnnnnnnnnnnnnnnnnnnnnnnnnnnnnnnnnnnnnnnnnnnnnnnnnnnnnnnnnnnnnnnnnnnnnnnnnnnnnnnnnnnnnnnnnnnnnnnnnnnnnnnnnnnnnnnnnnnnnnnnnnnnnnnnnnnnnnnnnnnnnnnnnnnnnnnnnnnnnnnnnnnnnnnnnnnnnnnnnnnnnnnnnnnnnnnnnnnnnnnnnnnnnnnnnnnnnnnnnnnnnnnnnnnnnnnnnnnnnnnnnnnnnnnnnnnnnnnnnnnnnnnnnnnnnnnnnnnnnnnnnnnnnnnnnnnnnnnnnnnnnnnnnnnnnnnnnnnnnntccccctcccccctctccctccttcctccttcccctctccctctcaaattttaaatttttatttcaagtgtatgtgggggggttcccccatatttatatatatgagtcttgtgcatgcctggtgtcttctaagatcaaaagagagtgtcaggttcctgagtctgagctgctgtgccggtatagagacttgaacccagagaccattcggtgaccttaaccactgtgctatcccttcatccccctttttgctcttgaggagcacaaagatgattttattaatttttctttcttgcgagtctgcaacaatctccagaggaacagattttatttttcagacatttgtgtagtttccaacgtgtgtgtgtgtgtgtgtgtgtgtgtgtgtgtgtgtgtgtgtgtggtcaagagatcaaattcaatccttccaaatgctcagtaagcccagtgtggctgagctacatcgagccctaattgctactctttcacacgtacataatgaacggggtttatgtgagcaggcctgaaaggaagggagcaggcttttttccttctgtaaacacagcgtgtgggcttggtgacttcaagacacctgatgacttttcttttcatttagtgacagtcgaaaggatgtgttattttattctttcagagttacacatctggtgcaaagagaccagaaaggtctatgaacccaggctgccccctaaaatgcatgtgtgtaaaagtgtcccagcccctgtctcttattgaacatttaatcttgtactttggcagatcaaaacaccgcagaccctggtggggtacaggtcctgggaaatacaatttgggctagaaaacgcagaagtggccaccattgcagacccatatttaagctgcctgggctgaagttctgagagcgaataaagagagaggagaaacaaaacaagaacctagatgtgctattttcatagttagaattaacttaggagaactgaaattaaccaaacctcagaaatctgaatcttgaaggacctcggtggctttggtggctgagagcctcctgtggtctttaattgggacagggtggggtggatttcattgtccagtggttgagcagcgaaatccatgttttttgctcttactgtcagggaagctgggagtaagcctcaggggagtggtagctcttctgggagcaagcttgcatcctgtttactttcaaatttgcctgtggtctctggtaggaggctcaccttaggagttttcacttctgcagtggaatgactagctctgatggtgtaccgctctgcagcaggagagcttgagttcaaggccaacctgggctacatcgtgtatatggaagaactagaaagagggggaaggaagaagggagggatgggaagggggtggttggagacagtggccgcagtcagattgacttctgtgttttaggactgtaggtgttagttaacgttgcagaatggtcacagcgataccagctcgatagagacttttcatcctctttcccactaggcagaaggaagagatgtggagtatccagggctccacttaattagtcaggaggagttcctagactggttaagagcactgactgcagccgagcttggtgacacacatctttaatcccagcacttgggaggcagaggcaggcagatttctgagtttgaggccagcctggtctacaaagtgagttccaggacagccagggctatacagagaaaccctgtctcgaaaaacaaaaaaaaaccaacaaaacaaaacaaaacaaaacaaaacaaaataaaacaaaacagagtactgactgctcttccagaagtctggcatcttaggattctgcagggcaagtctaagtgaacatcaggcactttgaaactgtgtatgctagtcccttaggactcagggaggcgagccggcaagccagtgatggttggtttcaagttagagacaggacctaagtttaaagggatagacagggtttcagagctggaatcagaatctaatctgagaaggaatgagagcaacaggttggagatgtcccatagcaccggagagtgagtggggcagcaatctcacaatctggcttgtctctcccactgtgacatggtttttgaaatgtgaacatggcagggcaggagactgatgtccaacatggaatcagtgtgggagcaagaaacaatatcttgtctatttatttatttgtgataaagtctctggggctggagagatggctcagcgattaagagcactgactgctcttccagaggtcctgagttcaattcccagcaaccacatggtggctcacaaccatctgtaatgggatctggtgccctcttctggtgtgtctgaagagagacagtatactcacacacacaaaataaataaatctttttttaaaaagtctcttagagcccccgccaggctagccttttgtctctacttcactatgcctgactaataagtgatttaatttaagaatacattcatgtatttattacctgtatgtgtgcatgtatgtatatgtgtggaggccagaggaccacatatgggagttagttttctcttcccaccatttgggtcttggggctctaactcaggtcatcgggcttgggagcaagcacctctacccaccagactgtctcaccagccccattaattttttattttaagtgaaatctgtccctcctccttgcaaagtgtttagtccccatcacaccaacttacagtgctacaagcctcagattttgtaatggcagctccctctgtctgtacgtctgacctgtggatattcatggctctgtctgtgtgtctgaggtgtggatgttccgagctgtgagcaactaactaaagcatggtccttgcaggttgggaaagcaccagccaaaccaagactcccttccggagctcttccatagagcaagcactgggagtctcttcctctccccttgggctctctttctcactgtgggacaggcatgctactgttattcatggccagattgtctgggtctccgatgagtaatggcatgcacctagccaggcaactgctgctatcagagtctggagttgggaatcttaagcaaacacatgtggacattcgcatcgttatcactctctcggaggctctgttttcgttgcccactttgagcgccagtaaatcatcacccctggcagtaagtgtaccatatctggacacacagaaggaaatttgctggagcctggctggggcaggccgttcttcagagcctgctcagtccctgtgctgagttctttctctccagcttagtggggcttgaaagatccatagctgctgaccctggctggggaggtaccagggtggggatgtgataaatccccagccagcacgctggctctgggagccgctttgtagctggccaagtggattatcggtgggaggttgatgttggtgtgtacaaacacacaggccctcactgctaattgtggtaaatcaggcaaccagcctggctctggggcctcccgtggctgtcaccacagccgtttggaagccctacatcctccagcacctgccaacatcctcagaggccattaagccagacagcatctttctaagtgcatttggtccacaaccctgcaattaggttttttaattgtggtgttcagagaaggagaggggtcaggggtaggttgtattgggaaagagtgggcacagaaaggctaacctttcccagatccctagggattgctaggctgcttgtcggtgagctccaggctcagacagagaccttgctttaaaaaaaatagtgtagaatgatgaggaaaacacctgatgtcaattacgccttccacatacacctgcgcacacatgcatacatgcatgtacacacagacagacagacagacagacagacagacacacacacacacacacacacacacacactcctggatctgcccatggctaagtgtttttggatcatttgctaaacttctgtaccccacagtaagaaactgtaaaggtggaggctcttcctgtatagagatttctaaaaaggaacctttctattccccagaatttggtctgcacagatcctgacaatgatgttttctgtgcctcccaatggatgaaatctaagtgtacatccaccatgctgggcctctcctcctttctctcaattgtccctttgtttgtgttcctgtcctgggctttccaagcttctagtagcctggccatatgtccaggtcccacaagaacacaggctggaagccaatgctcttgcaggcttccgtctcacagaggctgcctcaaagctagggctacctcgaaaccacacgctatggtcaaattgttccagccttttctgaaaggaagacgattcacactgccgatgagctgtgatgtgaagcaagggacagcccacgagaagcagagacttctccagcttagatggagaaccagtagtaacatttattcccccaatcccctttggagacagtaattgaggatcctggcttgactctcaggctccgccatgctctttgatgcttccctcttatctatctgactgtattagttgtcagccttaagctgggacatgcttccactgacggtaccagtaagaactcccatggcaggagaacctggcccaccagtggctttctgtttggctaatgctgtttatgtttggcttttgtcatttgcaggtctcaggagctatggggacctcccaccaggtctttctggtcctcagctgtctcctcacaggtatgtatccacacatgcgtccttgttctcctaactcacagttccagggagccaacgtccatgttctgtgggcctctcacctgcacctgggtccaaaggggggcgagatgaaaccaacaggaacttttgatgcctttcactaaatggcaccaattccatttcaaaacaagagctttctgtcagtggtccgaagggaggaataatctggatattgacatgtctgcacttgcccacttcttcctctctctgggatgggcttacagcaaggaaggagaagatggttttgagcatgttcaaatagagtaaagactcaggcatccttcatcaggtttagggactcaaacctgtaatcccagccacttgggaggctgtagcaggaagatcataaactcgcggtgtgccagggctacatagtgagaccctgtctttaaaaacaaaaagtaaaaagagggctggggagatgctcagtggtagagcgctggcctggcacttggtagatcctttccacgtgtttgtctgttgcagacattactccaaagttaggcaccgatggaaactagagaccattaattaataattaagtcagaacgtgtctcctcttcagacaagggaagctcggctgaaacgtgaagcttagggattagtttcaagcccccactccccgcctgtgttttatttattatttgtgaatttaaacccatgccttcctgctttggcttttggaaatcattaaggagagatggtgtgccagagggtggcagtgaggaaagacgtggggctcctgagtgagcccagatctgctgtgtgctttgttcgggcctctctccctgcctcttctcacatctcctgcccattttttttttaaaccaagggaaacttctgcagggcatatgcatgataaagaacccatatgtgcttgagcccagaccgcactgggatattttatggtcacacataagagtgtgaaatatggaattggaatcagacatcctttatccgtttgagtgtttggaggggtgagtatggggcgtttggtggggctgttgaggccgttggaacacttgctgccctcagcagatgcagtggctgttataatggggggcctttcatgggcatccagaggaacagagtttcacgtagaaatggccgttgttcatataagccgccactgtggctactctcagcgctctggagaagctgtcctttctggctcgccctattcaatggctgtccctttctacagggccgggcctcatctcctgccagctcttattaccctctatcctcccaaacgagaatgagaagattgtgcagctgaattcgtccttttctctgagatgcgttggggagagtgaagtgagctggcagcaccccatgtctgaagaagacgaccccaacgtggaaatcagaagtgaggagaacaacagtggcctctttgtcacagtgctggaagtggttaacgcctccgcagcccacaccggatggtacacttgctactacaaccacactcagacggatgagagtgagatcgaaggcaggcacatttacatctatgtaccaggtgagttgcagggccctcctagaccacgctgcgtcctgccctgcctgcctctgagtcaccgagttaaggggcataaaacacgagggattcataaatgtttattgcagagaaatttgcaaggtagaaaagtctttcccttctttcatctctgtctgtctgtctctgtctgtctctgactgtctctgtctgtctctgactgtctctaactgtctgtctctgttgctgtctgtctgtctgtctgtctgtctgtctgtctgtctgtctctcactggaactctcactgaggctggatctaggtggttagcctgccaacccaagctatcctcctgcttccaccttccacagagctaaggatatagatttttttctttttatgtgagtctttgtgattagaaccctggtactcatgcttttaaaacaagtgctcttactcactgggccactccttagctctctgtctgcctgtcagtctttggttcttgagactctcactgtcttagaacttgccattgtagtccaggctggcttctaacttatagcaatcctatggcttcagccttctgggtgctaggattaagggcatggggatgcttaacttgctggttttgtgtttgagataaggtctccttctgtagaccagactggctctgaatttaccattctctgacctcacctcccaagtcacagaattgtgtgcatgtggtacccgactccggtgttttgttttgtttgttgttgttgcttttgagatgagagcttggtatgttgcccaggctaccctcaaactgctacacttaactagtcctgctgtctcagcctcttaaatagcagagactacccacattatgaccagcaaaatacacaaattaaatacagatcatttgcacgttcaaaatcaagaaaaactcatgggaggcttggagatatggttcaggttttgggagcattcgcagctcttgcagaggacccaggtttggttcctaggactcacagagatacatccctctgttagacagttacaggagattagcgccctcttctgtcctccacctgaactgcatacatgtaatgtacctacatacatattcagccagaacacacacacacacacacacacacacacacacacacaccaaaaaccaaataaacaaacatggaaattcccctaaatgttaacgaccaaggcaaaaagaattccttccactcttcaagagttaatgcacctttgtaggaaagctggaatggtggtatttaaaatgcatgttgttttaaaagagaaagacttgcagcttgggatctaactcagtgacagagcgctttcccagcaagaggaaggctgtcgattctacccagagaagtggttattgtcaacatgtcagggctttattaattttgaaaagtctttactgtcgaatgtcttttattcagatggtacaaaacaaaaaaagaaatcaaatgtagtcagtcagtgtggttcagtcagtgtgagcaggcacttacatgtgtatcaggtgccatgtcttgtgtgggaggcaggattaacaggcggcaggccttgctttggatactcacagttcactagggtagattccaaatagccactcagtttcagctttcatacaaatgtgcatttactcttgacgagtaggaaggaattctctttgcctttgtcattaacatttagaggagtttccgtggtaatgatatgaccttgtgtctgctgagaggcagatgccaagatgtaggttacatgccttggttttataaggggcaagacctaggaaaggggtgggagggtccccgcatgctcctgctggactccattagatgaatcggtactacactgccttcttgcccatgggcctcaggtgccctcagtcagtgacaggaagcattgctggtgagtgtgattttaggttcagagggctgcagagctaggctctagaccattaagccctctgtggttggagggatgcgctttctctggaatccaggcttagctgaaagctttcgatgcatttggtctgccacccacctcgcctccgctctgagcttttgccgagctggagctgttggtatctgtatgtagcgttggtgagcagctgtacaaagaaggaccctggtgttacctacacaccatacaggtagcattcggtagtcgagaagattagtcttggagagggaagcccaactgaagcatgggaacatgagtctatctgtctgaacctgacccggatgcatacctgtctaaactctgtgtggacagggttcaagtgttcggaactctgaacacaaattagaacggtggggctttatgttgctggggaatggaaaaagctttggagtacaggtgactgccgttcacactctgcctttactgcatgtacacgggtgctgggggtttgaactctggtcctcacacttgcctggcaagcattttcctcctctccagctccgaagtgtctcttttcttacaatagaacagtttgttgtgaaaagggcaggtgtttagaatgtcactttaatgctacacagtaacaatggtggtgaagctaacgatgataatgatactaacagaacactttttcccccctgtatatgtgtataaaaatgaaatgaaactctaatagattcttctctctctctttaaaatcacagacccagacatggcctttgtgcctctcgggatgaccgattccttagtcatcgtggaagaggatgactctgccatcataccttgccgcaccacagatccggagactcaagtaaccttgcacaataacgggaggctggtgcctgcctcctatgacagcaggcagggcttcaacggaaccttcagcgtggggccttacatctgtgaggccaccgtcaaagggaggacgttcaagaccagcgagtttaatgtttatgccttgaaaggtactttcacctctctaagtgagagcaacaggcaaacaagttttttttttaatttgggtgttgcctcttccttctctatacaacgtggctgacctctgtaactataataatacaggcttaaaaaaatactacaggctgaacttgcttctacgtgtaagacagcatgttccctgaaaaatacctcaaggaattctttcttgcataagcctcttactatttggttcctattcttgaatatgcagccctaagaagcaaacacaccccagggggttggaggtctagattaatttcagtaacttaagaatcaagtgatttcagttttgaaggaagactatagttaaagaggctaaaacttcttccctttgatgtgaggggttcgttagcctgacttgcaaagtctcggggaggggggtcctggtggccgaattttaggtggggactttacacggacatggagcagaagcaagaaattgtcacttgcctcttgttacaaacttattttgttctgagctctgggaggtgctacgaataactgggggagggctggagagatggctcagtgtttaagagcactgactgctcttccaaaggtcctgaattcaattcccagaaaccacatggtggctcacaaccatctgtaatgggatttgatgccctctcctggtgtgtctgaagacagcgacagtaacagtgtacttacatacataaaatagataaatcttaaaaaaaattaaaaagaataactgagaggcacagaaaagaagttacagccaggggcacggagactttcagtggcttgaaagagtgcagccacagtcatacagcccaggcatgtggtgttcaggttaaaagagactgagctttaccatcgttgttattttgtatttctgttatatcctaagttgtgtaagactcaaagtccaggctccgtagacggtccggcttttgcctccattacactggtttggacatgattttttcatcatttttaacggccctgattcagctacaggttttactttgagatcccgactgtactgtattttctttgtcatctcatcacagcaacgtcagaactgaatctggagatggacgcacgccagactgtgtataaggcaggagaaacgatcgtggtgacctgtgccgtctttaacaacgaggtcgttgacctgcagtggacttaccctggagaagtggtgggtaccccgggataaggagctcacggaacccccacaacaggacttgtaactctacacaccagaggtgtttctcttggatgggcacatccctgagcttctctgggcctcagcttcccatctgggcaatgggcacatttgactccaggacttttaatttttctcaatcaggcagagtttggcatgaccacaagggacatgctccccttgagaaggcagagacaagcaggaaggttctgtggctagaacacaagcattaaagcattagaaaggcaagaaatgcctggattgtaaatattagccgattgcacagtcatgtatcctcactgtcttgggtcacacgccttggggttgtgaggtgtctgatagtgttgctaagtgtgtgtgttattgtggcctgtagtcacccagctgcacaacagcacaccagacttattccttccatctgactggaactttatataaagccttattcactctgatagctgtagagagtatataggagctgtgtatgaagaatatgtaaatcgaatgcagaaatggtgtttaatactgtgcatgggggcctcatagggaacaaaacacatgtatacaattatgtatggggaacaaatccatgtgtcaattatatatatatatatatgtatatatatatcatgtatgtatttttctccttactattacaaaataacatatagcacacattacatatatttgtgtgtgtgtgtgtgtgtgtgtgtgtgtgtgcactttacttgcatgtgtgcctgaatgacagaacagggtatcagatcccattacagatggttgtgagccactatgtggttgatggggaattgaactcaggacctctggaagagcagccagtgctcttacctactgagactctgtactctggtcgctttgtcattggagaactttgcttctgcttgccatttctctcccacacttttgctggcttttttttttttttgctgcctggccgttcattcacacttttatttgataatggtggatgtgtgggacagcacctttgtcacaacatgctatggaggtcagaagagtactcttctggactcagctctctgcttccacctttaaatgggttccaggggttgaactcaggtctctaagtttgcatggcaggtgcccttgcccactgagccagcttgcagaagcaagtctggtgctctttcattaggcatgatcgttaggtgttgtcaattgactgcatgcatggtgggacactcacagtctagtgtattatattccttgcactatagtgtgacttggtggttttcttcatgctccattacttttaatccctaaaacacaatacttcatttatgaagtgtttttaatttttaatttttaagccgaaacatatgacatttgacccacaattacataaaatgctttaacactttttttccctcccataaaagtgctgaaaacttctctttgaaaatttgtaaactatggagaaacacagggaaaccttcttctcagagcagcacacatctcagattccagacagacaggcagaccctttagaattcttcattaaaagattgttttgcaatactgatggctgactcagagccttgcaggtgctgagcacgggatccatggctaagctactgccttagcccagcgctttaatttctgcttgccttttggtttatcggggctcactctgtagcccaggctggcctagaactcgctacatagctcaagctggcttcatccccaggggagtagtccctcatcagcctcccgtgtgctgggatttgagctgtgagccaccacacttaacgctagtatcgttttaaagcatggctttttaaaaggatctagatttagcgttattttcacttcttgttactgcatgtgaagcaaatataataatggattcattatggcatttacacacacacacacaccacacacacacacacacacacacacacacacacttgattatgttcatctgccactaactctgctctcttgcccccgcccccacccgtgttggcagagtcccttcttttaggctagtccccttctttccttcatgcctttttacgatttgtttgtggtccaattagcttaattaaagtgacttccaggaggatgggcaaagggttggcgggagcatgggtcacttaccagggtctacattactggagagaatgtctcccctagcaactgctggctactgacaaggcctccgagaggacaggggcctcgctggcttctcccccttctgccttcttatttatatttctattctttaggaggttttatgctttagcgcatctttaggctcacagcaaatgtacaaagcacaccaatttcctacgtgatcccggctcccacctatgcttagcctgccaagtgccaggtcttcctcggagcgcaccgtgcttaggacccgatgagcctcctacactcacaaaccctacaccagggctcactctggaaggacctttttttcacacgaccgttttcttgtgtgccactgcagagaaacaaaggtatcaccatgctggaggagatcaaactcccatccatcaaactggtgtacactttgaccgtccccaaggccacggtgaaggacagtggagagtatgaatgtgctgcccgtcaggccactaaagaggtcaaggaaatgaagagagtcaccatttctgtccacggtacccactgttctgttaaatggctgccgttcgagggacttggttgggaggcacaggctgtggttattatttactgggaactcttgctttcacagagaaaggcttcgtcgagattgagcccacctttggccagctggaagctgtcaacttgcacgaagtcagagagttcgtggtggaggtgcaggcctacccgacgcccaggatatcgtggctgaaggacaacttgactctgatagagaatctcaccgagatcaccactgatgtacagaagagtcaggaaacaaggtaaagggggccattcccaagtcactcccgtaacaccagccttctgagcgctgagggagtggcagtaccagagggaccagcacctgagctgagacgtgcttacggtcacattttaatcacagcttcctcacactttaagataacattgcagcctgacgaggtaatacatccatgagtgtttaacgtaaaatgagaagaaaggactaaaaggttctgtcctccagtggaggacagcatactgtttcaagctaaaggtgaaggtaagatgggatgggatgcgcttggaccttgatggtcattatacttcagcagacattatgaactgattccatgtgtgaggtaattcgaatgtaagtctacatgtcaccaaataccattgtttagagtgcgtctgccccaatccaagattccactgagataagactagggtctcgttagatctgactgcagtgatggtgttggtggctctcatctctaaccactgctgctgctttcctgccccctggtaccgttagtcaaccatgggtctcttgtgtcccttgcatactcagcagacactctgccattgggcaccacaatttcccttgaagtttttgagctatgaatagaaattgcgagtcagaagttgctttattttcttattttttatttttttatttttttgagatagggtctccttctgtagccaggctgaccttaaactctcaacaatccccctacctcatagcctctaggattatggctctgagccactgtaccaattaaagtcattattgacatgtttcttgagacagggtttctctgtagccctggctgtcctggaactcactttgtagaccaggctggtctcaaactcagaaatccacctgcctctccctcccaagtgctgggattaaaggcgtgcaccaccatgcctggctattgccatgtttcttgtttcattagtatcactattattgttgttgttattattgatatatcgttttctgggacaggatcttgctatgtagtcatgcctggccttagacttgtaccgctcctcacgcctcagcttgcgagtgctgggagacacagcgtcttcctggcacagctgacatttcacgggtgtctgagcaggagtacaggctgtaataagtagtgctggcaaggcatgcttttcaggggagtggtgtgggaaagctggtcattactgagtttcgagaacccttcagaccttggtctttccgttcgtgggtggatcaggcagcacaaggtgaaaggagaagtcgctttcatggagttaaaaccagtgaacctgaagactttctcggctaaacagatgtaggctatgaatggcctggatcgtttggccaccaacagccagaaacctggtcgtgaagccaatccaatagcaggcagagacaggcaagccagtgtagcctgcttttctacaggtcctgtgcttgtagggaatattgaagcccatgaaatgctttcccacatttaatatcatttgataaatctcagaaagagtgctctgtgtgtgcagttatcgtattttatatgcatggaagcggaggtgtggggatccaataatttctacaattttgttccatccaaaatacttttgtgtattgggatgttttataatgaaatgaaaagtcaaatgtgaaaatattgtatttatacataaacacacacatacatacagcacatgcaggcgcacatacatgtttgtcagaggataatgtgggggagtgagttgttgcattatagcttgttgaagcagggtttccattggcactgctgctgtgctgaacatttcaggctagctgtcccgagagctacgatgcattctcttgcatttcctctcatctcacgacaggagcgctggggttggagatggagatggagatgggtaccactgcatctgacttttttttttttttgcgggttctgggggttgaattcagcccaccagaaagcaccaagttaagtggtctcatttaaaaagtcttttcttattttcattcagaaatgaggtcttgcagggcaatggtaacacacaactttaatcccagcacttggggaggcagaggcaggaggagctctgtcagtttgtggccagcctgttctacagagggaggtccaaaatagccagagatacagtgaatccctgtctttacaaacaaaacaaaacaaacaaaacaccaaaaacaaaacaaaaatcaaacccagaaatgaggtcttgccagaattgttagctacttggttttctattgaggctatgagtgacaccttcaatgtgtggaaactagatcaaattttagaaaagacattgatattgacaagaaagattttttttaagaaataaaatttcaatcataaaatgaagctgcttaaataatcggtggttatttagtctctacttatggaaataaacttcttgtctcttaaggtatcagagcaaattaaagctgatccgggctaaggaagaagacagtggccattacaccattatagttcaaaatgaggatgacgtgaagagttacacgtttgagctgtcaaccctaggtatgtaaaggtcgtgctcgctcacgggtgactgtcccccagaggcacctcggctcttctcttcaaagccttggaggagaagccagaccttggggtagaggctgggtctgacgcatgtcaggaccgtgttgtcgtgcctgaaaattcaggtccatttggaacagtcctcatccaaaaactctgaaatggccccaaatcggaaactttgatttttatcaggggaggtgttgagatagtttatgtatgtagcccaggctagcaatgctcttgtctcagctgtagcccaggctagcaatgcccctgcctcagcctcccaagtgctgagattctagacacttgtcaccacatctagttcaaaatctgaaacattttgaatgctcacacgatgttacaagtggaacatcctgacctgacatcttgtgacaggtcagaaaatattcaggcatataaaaatattgtgtaaaattaccgcttggttatgtgtatgaggtgtatgtgagatataaatgaattgcatacttaggctgagtcctttcctaagacacctatctcattaggatctaacttctgaaatctaaaacacttctggagaaaaatatgtgctgaggaaaaattttaaagtaaagtatgtattataaagtttaaattcttattttagtttttaaaatatttaatatttatttagttttgtgtagtttaaattatttactttaaatcaaagtatataaaggtaaactaaaacttgcatatttttcagcttattctttatttttattactattattattatcatcgtcatttggtacttgaatcccatgctttaaaaacaaatcaaggagctagagagagagctcaatggttaagagcacttgctgctcttgcagaggactggggtttggattctgacatccacatggtggtttacaaccatctttaactccagttgcaggggatctgataccctcttctggcctccgcaaacaccagacacgaatgtggtgcctattcatatacgcaagcaaaacacttgcctgcctctaacttatttgactacaaattggtgaaaagatctttaaagtctaatgatggcccccagacgcttgagtgaaggctgctttcatcagatccattagtcaaatcccgaatgcaaagatagctggaggatctcccttgccttccgaatggaaggaccccagcccaggcactcctcacctccctccgtccagatctgagtcatccaggcacaaagcccccaaacacgggcactgagggagctattaactgagtgggtctgtccaggctggagttgttctgttctgtcttccacaaccggtcccttgaggaccgttcctgaaccgacgggacccttccgcggagggatgtccctccacagccagagacaagagctgctctgccctgacttctcctttcctttcccagttcctgcatccattttggatctcgtagatgaccaccatggctctggcgggggacagactgtgaggtgtacagccgaaggcacccctcttccagaaatcgactggatgatctgcaagcatattaagaagtatggaaaccagatgttccctgttcttgtgtggtcgggatgtttcttccatgacataaagggcctcaagtgcagtttatttctttggttgacctctttttgtattcgcgattcttcctcggcccaaggctcatattactcacaaactatacaataggtttctgaaagtggattccatctcttgatgtgtgtgtgcgcgcacgcatgtgtgcatgtcctcaaagggcctttatttttatattttattctccattgtttttcttaaacatttcccattctctcttagaatgctctataatgtgaagacaaaaagaattgtaagaaccactcttgttcatggattttatctgtatatgtatgtatgtatgtatgtatgtatgtatgtatttagcttgcagtcctgttgtgacataatgtctcactcaccgtgtagccagtgctttggctgaagtcaaacgtaccattctcttgctttgctctcccaggcgctggggttgcaggagtgcaccaccagccctgcccagctcacatttctttctttctttctttttttttaaagatttatttatttatttatttatttatttatttacttatttattatatgtaagtacactgtagctgtcttcagacactccacaagagaacatcagatttcattacggatggttgtgagccaccatgtggttgctgggatttgaactcaggaccttcagaagagcagtcttaaccactgagctgtctcaccagctcccagctcacatttcttatttcttaccataaatgttgtctcggtggctagactggcagtgcaaacagagccgagagccgtgcccacgtgactcctcatacccacttgttctttggaagccaggagagggcactggatcccctgaaggtggagtaacaggtggttgtgagcattttagtaggaatgctgggaaccaaatgtgggccctccataagaacagtatgagcgcttcatggccggcccacctctctagcccctcctccaccttcataggcaggcccatgaactgtgcgcccacaccttgctccacggcaactacctgctttcagaaggccttgagtgcgtctctgctgaaagtgcagcttgctattgctctcctcactgagagctgtggagtgacctgggtcctgggatttctaggtgtaatgatttaacccagaagactactgcagccttagggaccccttagaagctcttcctggggttgaagatgaggagggaggatattttcaaaggagtgggagatttgcattgttgaacgtgtttgatgctatctcctgagtttgctcacaggtccaagatttgagataagtagttagattttgtggattttatctgcctcctccacaaaccattaactttggttatccacgtgagattactcctcttgagcaggtgcaaatggattttaatgtgaacaagcaccataaaacgagaactcccaaatctatgcaccataaaacaaggactgccccaccccccaaatatatgtaatgttagcaatgtggaagggtcgttgtgactcctggtaatcagatcttcatttgtgtcacattctctctagatgtaataatgacacttcgtggacagttttggccagcaatgtctcaaatattatcacagagctccctcgccgtggcaggagtaccgtggagggacgagtgtccttcgccaaagtggaagagaccatcgcagttcgatgcctggcaaagaacaacctcagcgttgtggcccgtgagctgaagctggtggctcccagtgagtttctcagtaggcagcacaactccagctcaccagccacgccctgtgttcctcaggtgggacgtggaatcccagacagggctcacagagtggcaaaggtcccaagacagttcagccctgtctggacttgaagcactggtcttcctgccaagccccctttgtttgccctgacccagctgcgtttgcagagctgcaggcagctttgcttgtcatgtagaggatgactaagcctctgtcatctgagcactggggtctagggatagaaagtgaggaaggggcttttgcctcacgatcctcagaacaggtgggtcaggtttgagtcagaaacaaagaaaggaaggaagccgagaaagagagagagagagagagagagacagagacagagacagagacagagacagaccgagagacagacagacagacagacagacagaaggcaaaattcacctttaccatgaaacttatgagatggatatttctacaaataaagttgctcctaacttattgttggtctccatcgtctttattcaaattgtccaaaaggagatccttggagtgtctttggaaagaaagtctttgtcccagggaagaatcacatttagttgcaagggtacaagtgattgagggatgatataggccacccctaaagtgacctgggatccccaacacttccccaccagcagggagataggccctagttcatttctttctgcctcccgtcttattctgccgtccacaaataactgacaaaattctctactgtctctgtcttgccttccagctctgcgatctgaactcacagtggcggccgcagtgttggtgctgttggtgattgtcattgtctctctcatcgtcctggtggtcatttggaagcaggtgagtctttggaaccattagaatgagaacaactgtatccttcggtgtttggttcagagaaggggtttggtaattccatgggtggtgggtcatgacagactttcctgggtccagtcactttggttctgtagtgaagctcagttgccttgaactctgggaattcaccagttacccaccctggtcattacagaaaccacggtatgaaattcgctggagggttatcgagtcaatcagccccgatggacatgagtatatctatgtggaccccatgcagttgccttacgactccagatgggaattcccgagagatggcctcgtgcttggtaagttcttgtgagggtaacctcccaggaccccaatgttacctacatagcttgctacgtacagatctgggacagaattagggacttgaacgccactcacagagctggatatggtagctcacactcttcatctcagcactggggagactgaagatggaggactgtgagttcaagactagcctgggctacatggacatcttcaacatgagctcattggggctgagaaggggaagtcaagggtcaagaagttgtttagcctttgtaaggccccagattctatcccccaaacgaacaaagttagtgcaccgggtatagtagcatacagttggagggcatcagcagacggatcctgagttcactctcatactgggtttcaggccagcctaggctacatgagaccctagagcaaaatgccaaaaggaaagagtcttttcttttttttaatgcacgtgagtacactgtagctcagacacaccagaagagggcatcagatcccattacagatggttgtgagccaccatgccgttgctgggaattgaactcaggacctctggaagagcaatcagtgctcttaacggctgagccatctgtctagcccatagaaagaaagtcttaattgtatcattggaatgattttggcctgacaaaaatattgcaatggaaaaaataaagttcatttttataaccgaagaggactagctgagaagtgagagaactcagtgggctacagtcagtccgttttgaggagtcataaaatacttctttaagtatatgtaatgtaggatggaaaaatatacgctggtgttgtactgcatgcctctaatctcagagacgtagtattgggagtccaaggtcattgttaactatatagagattttgagactagcctgagctatatgagatcctgtctcaaaaccccccaaacannnnnnnnnnnnnnnnnnnnacacacacacacacacacacacacactttaaagcaaaacataaaaaggaagggagccctctggggctatgtcacaatcaaggccctcgccaggtgcagtttttggctatcgtctgtctgtctgtctgtctgtctggttccaaagtacagcagagctaggcgcttaacagtcactcaagctgaacctgtgcttctttattgtattgtccaccactgtttcccacacagagcttagggaagttaaaaagcagtaaaataggcagggagggtgggtgggtgggtgtgcgcgagtgctcgctcagaggtggggatggagtagcagagcccctgctatccagcacgttgcctcgtcctcttggcaaggccacattactggaaaagcagcatctttctaggcatggatggcggaggtacatacagaccggaagagcgggcatgtccactctcagtgtctttctgtgcctgggctgccgtgatcagactggcttcctggaaatgcctcccttagaccacagtctctttaagagtggacaacagctttgatttctttgtctctacacacaaagaagggctgtgctggcacgtacacccccccatcccccccccccccaagtccagggaccttggtggcacgtacagcttctggtccaggaaccttcctttatgacaaagaagacgagtccaagtgttcagtagtgcactcctcagaatcagtggcatttggaatacagacgatttccagtggttaaggatttgttaatgcaaaggttgcctctgtgtgcatctgagagacagaagggtagagaaccagggggttgggtagaagccacggaggcaagtgcacaggagcccagggcctggcgggagcccatgttcacaccagggaggactgtgctttcccctctctcatccatgttttcctttccattgcaaatgccatttgacaaaagcaattacactaattcccttccctgtgggctcaattcttttttttggacatgatgacttggaggaataattaggcttactcaacacaggaaaaacacccacccagctgtacaccctcgtgcactggcctctgccagtgaggccgaggggccgggagctggcggtgatggctctgtttgcctacaggtcggattttgggatccggtgcatttgggaaagtggtcgaaggtacagcttatggattaagccggtcccaacctgtaatgaaggtggctgtgaagatgctcaaacgtaagtgtttcttcccagggatactttgaacatggacatactaagtaatttaagagtaaaatcgaatttaatattatattgagattctttggactgtgggttgagacttagccaccctccaaaattaggtttcttttgttcttatccctcattgttaaaaatcagatgctttcatttttggtaagagtttgtttttttgtttttttgtttttaatcttaaagaccagagactctggggctgggaaatggctcaatgggcaaagtgctttctgcgaaaacatggagatctgagctctgatccccccagcatccatctaggaaggcagaagtagtggcattcccctgtagccccaaccccacagggaggcaggatgagacaggtaaatcctggaagctcactggtcagctaggttactcaactcggcaagctctcaggttcactgagagaccctgactcaaaatataagatgtagaaacagttgaagaagatattctgatgtcagcctctggcttccatgtgtatttgtagacaagggcattcacacacacagacacacacacacacagacacacacacactcagcagtctagactgaggagaccatctagtgctcttcctttagactcttggtaaataaatactattgaatcacaaggttccatgtgttcttctgagaaccagaagtagggagttcagttgtactaaaatctggcttacttcaacagccacagccaggtctagtgaaaagcaggctctcatgtctgagctgaagataatgactcacctggggccacatttgaacattgtgaacttgctgggagcctgcaccaagtcaggtaggcgccttgttctggggttcctgggagtttctgggaatcctctttgttgtggaaactttttgttttgttttgttttggtttttcgagacagggtttctttgtgtagccctggctgtcctataactcactttgtagaccaggctggccttgaaccaagaaatccacctgcctctgcctcccgagtgctgggattaaaggcatgcaccaccacgcccggcttattgcaggaacttttgaaccagtctcaggcacagattgccctctctgcacccccaaacatgcctcctgaggataaagctcatacgtggagctcactgggtcccccgactttttggaagttcatgggttcagagaaagaatggcttctttctgttctccatttttatactggactgtttggtacccacaggtcccatttacatcatcacagaatactgcttctatggggatttggtcaactacttgcataagaacagagatagcttcatgagccaacacccagagaagccgaagaaagacctggacatctttggattgaatcctgcagacgagagcacaagaaggtaaacatgagaggagcacgtgtgtccttgtgtcggactcagacatggagaaaagcctgtcctgacaggttccaggcctgcagatcctaggccagcaccagaagccacgaggctgggagcctacctagccatccgcgtcagtgtggatgggtacacactgcaggtgtcttgggctaggtcatcacatggcaaggctgtactgattggtttgaatgacggggtgagggggggtgggatccttctgagagccattctcttctctgtatgtgctttctcaggacatgtcaaaggatgtcattagtgctcatccccaggacgagttgttggtccttgctgaacctgggccagggatattcgcttgtctctactgataaaacttccaggtgtccgtaaagacccctgagagtagacggacctcccatgctcttgagtcacttaatgggctccaaatgggtggtcagtttaatgagtcgcaggaactgtgtgtctgagccacatggccacatggccactgaaccttcaggggacagtgactgccttcctgtcatgaacttttcaacagtttagtgtagcagactaagaatgtttcttgtgtttatgggaatgtagcccccaccctgacttccctgtggctcctggggatgtctctgctccttgtgaggatgtgtagaagacagagaagtaaaacatgaagaatcgggctggagagatggctcagcgattaagagcactgaatgcccttccagaggtcctgagtgcaaatcccagcaactacatggtggctcacaaccatctgtaatgggatccgatgccctcttctcgtgtgtctgaagacagctacagtgtacttacatataataaataaataaataaataaataaataaaaccaggaagaatcatggagactaccttttggggaccccagctggccctaagatgtttcccttctatttagatggtatcgatgtacggactctttagaagtgcttgcttactcctggatagagttctgatgccttccatgtcaccagagtcatcctcccttcccatcacactgggtttgagatgacctgtgcgctcatgtctgattaatgttcatctgtctgtctggaccaccccatgcacagtgtgcccatggggattgtttatgctcatccccaagcccttgatacctctctcagttaatggcacactctaggtacccaaattagcatgtgtttagttctctactgagtgactgcattagaggccacccggggtgaaatttcttcttcttcttttttttttttttttacacagttatgtgattttgtcttttgaaaataacggcgactacatggacatgaagcaagctgataccacacagtatgtccccatgcttgaaaggaaagaggtttctaaatactctgacatccagagatcgctgtacgatcggccagcctcctacaagaagaaatccatgctaggtaaaagtgcccatgctcattctggcaaatatgatctttctgtggtttaacttgctgctcagagggagggaaaccgggatgacaggtagctctgccaagcagtgtgctccctaagtgcacggctgcgcagctgggccaagatagctttttgtagatttgtgctctatgtgtgagaagaataaagacgcagggttgctgatgtagccctatggtatattgcttgcccggtgtatacacagttccttctctggaactgaagaaaaagtatatactattgtaataataataataataataaagacagatataatgtaatcaatttctcagactttaaatgtagtggctttaaataaataattcattctgctatgatggtctttgcttgttaacatgtcttttgttaaaaaaaaaatggaagtggtgataattggtgttttctcaatggccaatctgaaagttggcaatcttacattgtttcctcacattttttgttttgttttgtttttcctgtgagcgccataatcctggcttttagctctcctaatgtacatgttgtgacactaactggagagcagacagtttgaggttgcagtatctgacaagtgttcctgttgacttttgtttgaaagcaaacccccctcctgttttgaaaactgtgctgggatgagttcatttgtaaactccggggtgccaccggtgatgccacaccagatgggccacctcatgccagctctggggtggcgactccagggctcttgcttaaccacacactcgaagtgagcagtatctaggcaggcctgagcttttcctgtgattctggttttggggggggaagggggggaattgaggctctcatcagctgctgcaataatattcagctgccatggagattgttttttgaaaaatcgctaacatgctctgaatgctttcagggttcttaagtgaaaggtacaagccattaaaaagtatgtgctggctttgcaaaacttaagcacgtaataatattttccagttctgtagctccgtccacttcccattgccaaatggttgaacttccaaaccttcttaaagtttacccagtgagagttgttggaacgctgttacctttccactcccaaatggttaaaaatagtttgcactgcttcccaggcagagctggtggacttggcaccagggagagggggcccgagtcatgcttgccctgggtcctgctggcaggcagaccacagttttctggccttcctatagctggctgaaaaaaaaatggctggagctgctcatcaccggcctgcaaatcatcaaaaagtactgagcaccactggcctagattgcctgcctcctgagtgtgtgtgtgcagggcagtggacaggttgcaaggggaggtccatgccccatcctgggcacggcccttgaggatggctgcctgctctgttcaggaggtgatttaactggcaaattagacacaaagcaaaataggaaagaaagcaaacctcagaatcatcatggatggtttcagtgtgtgtgtgtgtgtgtgtgtgtgtgtgtgtgtgtgtgtgtgtgtgtgtgtatgtgagagagagagagagagactccaagatggctgaggtgatgtgacaaggtcaaaagtgaaatccaaggtcaaccgacaatctgtctgtgagattccgtggagggagtaggtttgactaatcattgtgtgtataattctccccctgccccgcccagtctgtgtttgtgcctgccggatgaatatctcttatctgaaacgcttggaactgaatgtgttttgaatatatttttttcaaattttggaatatttgcatatacataatgagatatcttgggtttgggagccaagtctaagcacaaattcatgcctgtttcatgcacacctcagacacatagctgacagtaattttatacaatatttttttagtgtgcttgtgttttgactgtgatctgtcacatgaagtctggcatgaggatacttttaccagcgtgctggtgctaaataagttttggatgtttgaagcatttcggagtcaggattttgggtctgggatgctcaacctgtgtatatttcttttggaagaaagaactattattttgttcctttctatttttatagtactagggcatgaaacgtgtgcctcgtgcctcctgggaaaatgctctaccactgagccacacccacagcctcctttgtatacttttttgtacctagtaaagtctaaaaattatgacaaaaatgtgttcaaaagagatctttgggcaagcttctgcaacctgccagacaaggggatggctgggtactgggacgccccccccaccccacttttacctaacaccaacatatttggttccttcccacagactcagaagtcaaaaacctcctttcggacgatgactccgagggtctgactttgctggatctattgagcttcacctatcaagttgctcgaggaatggaatttttggcttcgaaaaatgtaagttcaaggcccagagacctcttcagacccagccatgccttcagagggaggggcatgggaggaaattggaggaggaaggtctaagagccagagtatcagctgctcagtttaacccgcctctctcacttcccctaataggctgggagtgtgactcactgggagtctgcctttctccaggaggagtcagggaggggagggaaagggcttcctgccagggcacttttaagtgcccatcatggactgggtggtcttgcaggagtgctgcaactgggccttggctggagccattctgaagtgatttcttttcttcccacgtagtgtgtccaccgggacctggctgcccgcaacgtcctcctggcgcaaggaaaaattgtgaagatctgtgattttggcctggccagagacatcatgcacgattccaactacgtgtcaaaaggcagtgtatgttcccgccgtcctcgatccttctttccccatccctttaatctcagaagttctgttatttcttaattcaggagccagttatcagctggttccagaggtctcatagggaaagcttaggtataacagtcagacagcctggtatcagctccaccctatactagggttgctgtttggtgaagtctcttgtctatttcatgcctcagtttctctgtttgtagcttcatccgtttcctaaattactacaagggaatgatttaggtaattcacacaaagtgccgtagacagtgctggacatatagaaacatctatcaggatctggatagatggctcactgtcacatgctggtcttccagaggatctgggtacaatttccagccctcataaggcagctcacaaccacctgtaactacaggtctagggatctgatgccatcttttggcttccgatccatgtagcatacagacattgcaggcaaaacacccatatgtgcaaaattaaaaattaaaaaaaaacaattagacacatgcagtgttatttcctagtaaatcaagtgtgtacatgaatatacaagtgttcatttccaggggagagctctagtttttaaacctctcaccagatttccaacagaccagtttaaccttgagaacatcaagactgcttgaatagatagaacatcaccgtttctttggtgatagtttcattgtctacttgatcctccctcttccatcccttcagcctgtaagcccaggagtcgctgaggacacatctgtcacccattggtgcaattatatgtccctctgttccactgatgtaagacagcttactgggctgcagcctctgcttagaggacagtaatctctgtccgtgctctgtgccccggactcgggctcaatgactgtagccgtggctcctcccaggcaccccgaacaagttgctaaacttgggtggagatgatttcttacctaaggttatgaatgtctactatttcttcgtagtctgggggaaggggtgtgtgtgtgtggaaggatgctaacatgaagggcgctgtgttatatatcttcccagacttagtatttcacctgctgtttggaccacctttgcaaaagagacgcgtttgagtgtcttgtctttcggtggtagaaaaccaaacttatttcttactgcttggaagctgacactggtttccaggatgctgtatctatctattcttagttttgttcctagggtggcctgaaaactggtctggtcgaaggccacactttattggtaaattgaaggttgaatatgcttagcatatcattcctttggaagctatgagaagtggcgttgaccactccttgtctgttattattaagaatctacacagtggggctaaagagagagctctgagagtgacgtgtttgctgtgtaagcaagggcacctgagtttgatgtccagaaagcccgacatagtggccagtgcttgtaacctctgtgctggggagtcagggacagacccctcgagctccttggctagatattctagctgaattggtgagtcccaggccaggagagagcctttgacctccacatgcacacacactcatgcaacaagtacttgcatacacacgggcatacacacacatacacacaacctacctagttgctggtgaacagtaaacccatgagagacagaatgctggcaagatctttaatgcattattcccagcccaaggagaacccctttctgtttctccagacatcagagcgtagcccgtgggttcatttcctctctcctttcccacagactttcctgcctgtgaagtggatggcacccgagagcatcttcgacaacctctacaccacgctgagtgacgtctggtcctatggcattctgctctgggaaatcttttcccttggtaagagctcaacggctactgtggctcattctgaatggcactagaagggacatgagtctgtcccagttccagggggacacatgcagtgtcaaccagtcacactgaagcctcactccacaggtttacccctaccatgtctgacataggctgagtagatccagtcagggtctctgtgggctgcttcctcacccctggctactggcactctggttatgcgggagtcacttgcccccgtgggaagtgtttcccatggcatctgccttttcattttgaccttgattagagagatcaccaatagttcctctcccttacttgatgatgaatgatgcccaggtgaaaggtgatgtggcagggaacccgaggggtgtatgtaactccacatctcaaagagaaaaaaaccgttcttaacattcggtcacttgtcattagggcctgagcaaatcaggtgcctgctgccaagggagggttgtaagggaatagtgaggtttgactggactttggggatatacagattacacacttagaggtaaaccctgtaagctgtagtgtgggttcagagacaagacaaaggagacttggagtcgttttggaaacttcagagagggaattgaacttgacttggccttggccatcccacacactgctaccccttcagttctcctttttctgaggccctgcatgcccttaaaacatcagactatggactgccaggtcctagctttgccttgggctgtgatttgtgaacacttctgaagatgatgttctttagtggcgtagaacacctctccgcctcgttcgtgtgtttgcatttagatgtggttgctagaaacagcattcagtgcgttagtgaattttgtgctaaagttgcccaagacgcttggatttagtcacccaagaccgctatggcaagtctgaaaagtcctctggagtcaaggagatgaaaatatacagattctttgaaagaatcaggccctcaggggttcaggatcaaaggtgtgtggtacaaggaaaaaccctctgtcatcgggttatctctggctcgtaggtggcacaccctatcctggcatgatggtcgattctactttctacaataagatcaagagtggataccggatggccaaacctgaccatgccaccagtgaagtgtgagcttcctcctcacccacgggcccatgtccacacttgggggggggtgtctgtggggtggctgccgtctacgggcaggcccacactcactctgagctctgcctctgcagctatgagatcatggtgcagtgctggaacagtgagcccgagaagagaccctccttctaccacctcagcgagatagtggagaacctgttgccgggacaatacaagaaggttggttcgagcctgtgacagtgggcaggaggaggcgggaaggaggagagactagtgagcagttatgccaacaagcagagctgctctgagctgtttgaaaggaacgctttcaaaggaggacacggattgtgtgatcttgtgaccagggctttggggagtgctctataggaccccagtagcactgatgaatgagagcccctccctgcctttccacagggctctctttcatcttaggtgtgagacacctgtaggcacttcattctccagacatctgagtatctgaagctaccaagcagttagaactctcaggacatctgaggccattaaattgctcatttgaatacacttaaatccatttgaaactggtttttaccagctgactggaggggacaatcccagctgttatctgtgactccagctggttttcagtggcacagaaagcattgttcaaagggacaaatgtaatttcacgggacctacgcaggagccgtaaatgaatgtgacaattttccgccgaggccttgagaggggaagccgcacactcccgtgtgatgaatctcatctcagactaggcaccgcagaccgactcggttctcttccctcttgagaggcaacatcagtgatttgccctagagcctctcatcatttgagctgaaagttcagtgtgtcagttttggtccctcagcaccggtttctcctcacattcgtgatgctgggatcgtgtaggggtaatttacctaggtcagtggaaggttctctgttggtgggaagaggaagacactactgctaaaactagttgtctgattctgtctgtttcggccggtgccgcatacacagacggcgaaaatctacgtggtgtgttgactagggtgtgtgcctcagaggggcatagctaggtaatttgtttttgtttgtttgtttgtttgtttgttttttgagacagggtttttctgtgtagccctggctgtcctggaactcacactgtagagcaggctggcctcaaactcatagatctagagatctgccagcctctgcctttgaagtgctgggattaaagatgttcatcatgatgcccaatttacgtttaggcttttttttttctttttgaatctagcctccatacagacttccggtatggatatatagcccccctccccccatcagcataacctcatcactattgattgatttattgattgatttgttgttgctttcttgctgatggccactttgactgggtgagtggcttttcttctttctccagtggctaaggatattgaatgctttttaaaggatttattgaatatttacatttattcttttgaaagctaaatagtcagtttattagccaatttattgactgagtatttgtgtgagtgtgtttgctgctctttatatagcctgcatactaatccattgtctgatgtatatttatatatgtggcagagctttccccccaattctttaccttctcttttcacttttgtgactgttcccaaaaaacaaaccacaaaagctttattatttctttcctcttttattattttattgttttgtcttgtgggtttttttttgttgttgttgttgttgtttgagtttttttgagacagggtctcactttgtgtctctggctgacctggaacttgctaggtagaactcatagagttcttccttcctcttcctccctagtattagaatccaccacacctggatatatatttactgttttacacaaggtctcactatgtaactgtggctggcctggaactctctaagtagacctagctgacctcagcaaggttctgcatgcctctacttcctggattgaaggcatgtgtcaccacacccagctttacattccatttgatcctatttgtcattattttatgtgtgtgagacaaggtctcactatgtagccctggctgtcttggaactcgcaaagatcctcctgtctttgagtgttgggattaatggcaaacatcacttgcccagacccacttgctagtccttgatcatttcctgtgcttttggagtctgactcagaaaggtcttgtctatgtctacatcttgaaatttttttctactaagtctcaaagctttaagtctttcattcaggactttgattcattttgaactgagttctgttcttctagttttccaagttgttaaataggctgtcttctctccagcgtcagcttggcctccctatgtcaaataggtggctatatctgtgtgcttatttctggatcgtctatcttgttccaattgatacatttatttatagttatatagttatagataaactagttatatatatgatatatatatataggctctattatatagtttgaggtcaggtattatgagtctggggattataatatttcaaacattgctctagctatttggggtcttttttttatatgaattttagaattgcatttttagttctgtaaaaaaaatgttgaaatttgttggggattgtgttgaagccaggcttagaaaggcaagaaccatgtttcttctaaatatagaaactaatttaaaattatgtgtgtatacatatatacacatgtgtgcacttatttatctaaatactaattttatttttaaattttaacttatgggtatatgagcatatgactgcttgtgtgtgtatatatatatatatatatatatatatatatatatatataatcacgtgtgtgtgtgtgtgtgtgtgtgtgtgtgtgtgtctgtggaggccagaagtgggtgtggaaatttttagaactggaataatataaggttgtgagccacctaatgtggatgctgggaactgaacttgtgtcctctgcaagagcaacaaatgctcttaaccactgagccatctcaccagtctctatatgtaaatgtatacctgcacatgcgcacacctaaacatatgtgtatgcgtaggtcaggaagcaagaaaggggatcgtgagaagggaggaagagagcttaaaggttggggtggagagagtcatgaaatatatgtggtaaattacatgttctaaaagtctgcatttattttacagtttgtcagtaacatctgattaattgtgttaaatgaatactttcagagttatgaaaagattcacctggacttcctaaagagtgaccatccggccgtggcacgcatgcgggtggactctgataatgcgtacatcggtgtcacttacaaaaatgaagaggataagctgaaggactgggaaggtggcctggacgaacagagactgagcgctgacagtggctacatcatccccctgccagacattgaccctgttccagaggaggaagacctgggcaagaggaacagacacaggtaactacagccaccttcctcgtgctagcctgcaggggaggactcagggagactgaggccaccagggatgtaaactgtgcgtgggcaacaggtgcatcattccagggtaggtcacaaaggtttgaaaatacctcccatgtgattctgaggtgtcctcttactcctggtgagcgcttcgtttggtcaccaaagctggtgatgaaaagctccactctgagctcatttttttgatttatttatttattatatgtaagtacactgtagctgtcctctgacatcccagaagtgggcatcagacctcattatggatggttgtgagccatcatgtggttgctgggatttgaactcaagaccttcggaagagcagtcagcgctcttaaccactgagccatctctccagccccactctgagctcttttttttaaaaaattaggtattttcctcatttacatttccaatgctatcccaaaagtcccccatacccccccccccactctgagctcttaaacagccatggagcaaggaaaaccttgagagaggcggggttgggatatgaggtgctccatcaacagcctttagccttgcatgcggtgcagaactagctggggaggactttcaaactgctgattcacaggcctctcaccctgtcagtctgtctgtccctccttcctctggtgggctgccttctacttctgttttgtgtgacgcatagggaagccacctcacaaaggggaaggagtcgggggttctacccacctgcagatgatcgtgaatttcaaagactcagatggacaaggcacatggtgacccaaggcagaatatggaaaagccagcaagaatctagagaagggaggagaggtggggattttgggcaggctggtgattttagggatagtaacactaacacctaacacttttgttttaaaagtgtttagtacacagtagcagtgagtacacctcccaattagtgggtacaggggttgacatttgccccattctctttatccagattggtgtcacataaatcatcatgactacagacacacacacacacacacacacacacacacacacacacacttatttctcacccagtgactgaaagctaagtagaaaacaccaagataattcattcctagtattctgcgacactctttcctaagaatacgatcattcatgctgtgtctatcatgaccacacggaagagagtgaactgttaaagaaaattagagttggaggtatagaattcatgttggccatatctgaggccataggttcacatccctgtactgaaagaaaaaagagaagaagaaaaggaagccaacaaccggtctcagattcatttcatacctgggctttattcaaattcagttgaataataactgctaatttattgagctctttatatgtttatagttatcagattattatcgtatttaatcatctcagagatctttatttttatttttattatgtatattttacttttgagattatatttatgtgtgtgtgtacagatctgtacacctaagtatgtgactgcaaccggcttagactgtatgatactcgtatgtgtacgttttcggggctgaccatttggtattggatagccaatttggtgtattcgtccctggggaaggccctttttctggttctcaaccttccttcgttatctgtcgctcttggtctagaaaagaggctgcctgagctccttgcttacccattaccgtgcctattggtgccgttctggtgcaggtcttgcgggcaaggcttctatgccttgtgtaaatggtaaactgaagacttttctcttctgggcctttagacccagaggggcggggtgaacaagaggcaggggcctggcaggaagtgaaggaagtgtgggatcccatccttctgcttcctaaggttttttttttcccttctctctcagtaccttttgattggctgttgcttgttctctcccctgataggctgaggagggaaagtagaaactcttactcttgttagccacgcccacaaaagacccctggcaggaaaggcagcaaactgacctgcgcagttggccctgttttggttttgtgttggctctgtgcagcaatggccagtgagtggctggctggctcagccgctcactggccatgctcggccactcatgcttcaacaggaaaggaccttgtgcatgaggaaagagtcccgctgcttcaggcagccaccctggaaatgcagccccgtaggcagtctgtccatgaccttagcctttgcttttcaatcccatcagctcacagacttcggaagagagtgccatcgagacaggttccagtagttccaccttcatcaagagagaggacgagaccatcgaggacatcgacatgatggatgacattggtatagattcctcggacctggtggaggacagcttcctgtaactgacacgctccgggtatcatcttctccgggagcctcctcgggataaccttaagaaaaccacttcattgcaatgcaaaagttgagaagaggacttgggtgatgtggagagagaaagttcccgaggccgagggccttggtaagcctgtgtggatgactgggatacttggattgaactttatccgtgttgcctcttgcaacgcgtcagtagcatctcagcggcgtgtgcggtttggaaatggatggacaagagagtgactggccacagaagacgggctttgtgtttccagggcatgggtgagagtcccacacgcgccaacttgtactgcagacaactccagcattgtaattatgtaaataactcttaaccgaggatgggtttagatctgtgttaactctcctctccggacctctgaagagaccactcagtccacccgtgtgcttccttccttcttggaatccggtaccagctgctgttgaattttctcatgaagtacatgcaaaaccactttgaactttggaaggtactggaaccgtcgtgttttactgtcttgtaagtgttaaagaggcaaaaagataaaaactaaccaaccgtgagtagtaggtttgggtcttttagggcacccaagaattcctctgtatcttgtaatctgtacttataacactactactgtttaacaagaatgctaaatatgtaatccgtaacatgatttctttacagagaaagcacaattaaaacaaaacccttactaagaaggtgacaagtttggcagtttttgacatttatattaagtaacacgtttctcaataaagtataataggtttagcggattaaagttagcaaacactagagagcagagtgtaagtagttatccagaaagtcaaacctttttgttttgttctaagcagtctccctaatccaaggcactaggaacagttaatgacctctgaagtactgggataagcaaagcagaaacccggtgggtgtcctaagtgttctcagtagaaaggcgtacgcctgagcccagtgtgactcctcacgctgtgtgcgaccttctggaagagactcattcacaaaaaggactcagatgggcagaatgtccatcagatgggactcagatgtctctcctgaccagtgatggcttggatggatcccgcccatacctacttttaaagtctgtgacttttaaggatgcttcaacatcagcaccttactttttctctcttgtctcagacgagaaagaactgcaaaccctgagaccacaatggtgctgttgaatgaaggctatgtgggcatcagcttggctcttcccttcccaccattaactacagctacagttactagcctcaatggtgtcagacctttgccccagagatttggaattacaaggtctgacgggagcaggaagctatatatatgaactgcctggtgctcttgaatagtcagtgttcagaaacactggcttgggttactgttgggggagggcaactttgaaatttggaacggggctagaagtcaaccatgcaggaaggctactgtttaagttcttggcttcatgtcaataacatgtcaatgccacgtatgcagctattcctacccttgatttaagtttccaggcttggctgaggctgagaaagcaaacatcttgacttgggaacatcttcccattctagtcaacgtgggtaccacttccccctggatgggagaacctgagcttgctcgcctcaaagtgtgtccgggaatgatgcaagtctgtgtgtcaggtctttgtgcaaccagctccatattcggtggagaagattaaaaaaaaagttttctgaatttggggcctttaggtggtaggctatcaggagcatccgaactgtcaaagtggttagtgtgagttcattggcattctctgccatgtgtctaattgctgactctgtatgaatgaaacatgggctatgattactgcaatcactgtattgcttctagcaggtgacgctttggaaggcacagaagcaataacaaggtacttgactacctactggcataatctcaatgcaaaccccaactttcccttttcacagtaagtgtgaagactgagccagattggccaattgaaaaacaaaaacctgactagagtctttcgagccaattagacttgaactacatccgtctttctagactcgtggctggagcagtctgtttaccactcatttgcacagcctctgtttgttgcttctttttattctgatgtcgctttgggccttgcatgacaccatgaagttggatgatacttctcagaccagcagtttcccatctttagctgtacccacctctgagattcaatgggaatacgttcacttttgttttttgagacagggtctttctacgcagccctggctgccctggaactcactgtgtaaaccaggctagccttgaactctcagagatccactgtctctgtacccccagtgctgggattacaggcatgcaccaccacactcagcagggatacatttttatttttaaacagtgttttgactgtatcctgatttgttttctttctggcctcctgcagagtccctggaagaaaatttaccaatctttcctgctttctatttttatgatgacaatcaaagcttgcccgaggaacacaatttgtgacttttaaaaaaatgatcaatgatgtccttaaaaaaatgtggtctgccaacctgtacaaaatggtcctatatttgtgaagagggacgtaagataaaacgatgttatacatcgatatgtatatatctgttgctatgtagacttggagaatactgccaaaatgtgtatgacaagctgtatcactgcctttgtttatattttttttaactgtgatattccccacaggcacgttaactgttgcacttttgaatgtccaaaatttatattttagaagtaataaagagaaaaatactgacatgttcccaacatggtggtgtggtaagtgtgtgagagcgacttactccataggaagggtcttccaatacaagatggcttccagatacccctgttcatgttttgttttaaaaagtgtaaatggagatctttatatttcaataaatgatttattatatatgacttaacgttatgaaggtctaccacttctttcgctttgttttttagtttggtcagaattccacccaaccctctctctaatgttcatcctgttgttagtttgaggcaggatcttgttgtatagctctggttggcattgggctttctgattctcctgcttcagcctccaaagtactggtatcatagacatctagcacaatggccatcttttcctcctcctccccctcctccccctcctcgtcgtcctcctcctcctcctctccttcttttctgaatagactcactagttagtaaagcagttttcggcttacaggacatttgagtggaaactggagatctcccatatcccagttggcatcacacacgagtagcttccccgtctctatggtaacctatcagcatgtacactgatgagcctgcatccctgcgccatcacctgtgctgtgcttgagcatcctctgttacgtgcaggcaggtttatgtgcttcacattcgacagcctcctggtatctcatcagataaattagtgcaattaattaatgcagattattctcttaataattggaaaataggccccctgtttcagaataactcccaatttcagatagccaaatgacctcagagtgagaccgcctacagatccaggcctgtatccttcagcacaaggctgttcattgagtattggctccaccttggttcagcccaggaaggagctggattcctgggaataataacatgtctgtctgaacagcagctacacagttccgtcctctaacagacagtcctgtctaatttatctgctctagtgttttcgtttttttttttaattaggggattaaaaacttctaaaatgtaccatttacacttcttttgagtcttgcaataagcttttaaatattcctaccaaggcagggaagacatctcataggtgtagaaacgaaggaccccaagactaatgtaacgatagcactaggattagcaattccaaatatatgaattccactattatttgcatgatgagccagaaagaaagcaagagatactgagaatatcagcatgcagaagtagcttgcctggatcctttgatttttcaaagacaagtgatggacaagttcagcctggagaaactactctatgtgtttgtaatcagagcctttctttttcaggctgaaatacaccaggtctaataatggccattgtgattttaatagtggcgtgcttcatgaaaagcaactcaggaaaatggcctaccctatgagaatccatcataagcctggcaatttccctcaggataacagcaacagaaatgtttcattatcttcaactccaaatacacataaaggctaaatccaacagcatataatggtagcagtgtttataatagagacaattgtttcatctcataggaaaatgtgtgtgaaagtatatgtgtgttcttaattagctgtctatagcatcctgtcccacctggagacatgagtagcacccacgtcctaaagtataatggcgataacttcccaactaagttcatatgccagtaatggtccatcattcatacaaagaggagggagacgttgaggacagatgaggggaacatatttgcttcccctgccccaattctggtttataggctaattggaatttttaaaagctttgccacattagcccggcagatggcattttgcttcatcattgttcatgggtattaatgacttccccctggagcttgtgcatcctgtctgttttgaatttcatcacatttcacacgaactgctccaaacagaatcagaaccaggcttttctctgcagagactgggctggagattggtttggtctatgtaagttggaagcctgatcaggatgaagctgaaataaaaggaggcttttgtgggcctgggcttggctcttctgtcgtctcacgcatgttttgtttagctggctctcccaacgggctcccggttgaatcaggtgtatacagagccacttccagagtgaatgcatcctcatgagtctgggatgatcacacctcttttcttcctccctcaaaaggctgtgtttggttttcccatgagagcacggtgctaggccagccacaggaagccatttttaaaattaattctctccaagaatatttattatagaacagactcctctttgtgtagttgatctctaaaatgtgtaggcctaaatgaggaagcttgcagacttttttccaaccagctcatgatccaaggggaccattacatcacatagaacagcaggatagaacatcgcggttggagaccacacgccttgcttggagtaatgagaagtgtaaggtagtgtaagaacccagagtgctgctcgctgagtgctgttcactgagtgctgctcgctgagtgctgctcgctgagtgctgctcgctgagtgctgctagctgagtgctgttcactgagtgcacccgatgaagctgaagcttttccgcatgtggggaatacacataggcaaggggccgagggctgggagctggcagctttgtctatttcagatgctatctttgttctagttccggacagttccaaggcatctgcatatctctttccacacttatccctccaggtttcaactgtactgagcagggcattggtttaggccctgggattcagcaattattacagacgataaaaccgctgcattgtgtctatagtgcctcccccacagcacaggacagcactgttagagttacaaaggcagtgtctctctctgggggcagaggctgtcaggcttgcttgcagcttattgtagagtctagaatttctcttgtaaaaaagggatttttacgctagtgtgtgtgtggtatggtgtgtttggtgtgtgtgtgtggtatggtgtgtgtgtgtgtgtgtgttgtggtgtgtgtacatgtgtaggtatgtgtaagtgagtatactatgtacctgcagaggtcagaagtcttggatccactgatgctgaggttagaggccattgtgagctgctgagtgtgactggagctgaagtcaaaggtcattttgagccactcaattgagtgtggatggaaattgaacttgggtcctctgcaagagcagaatacactcttaactaatgagccatctcttttgccaagacctgtgtgttactgaggattctctagagtcacagaacttatggaatgtctctctctataaaaggaatttcttgtaatgacttacaatctttagtccaactaacacaacaatgggcagctgtgaatgggaagttcaagaatctagtagttgctcagtcccccaaggttaggtgtttcagctggtcttatgtgtaagctggaatcctgacgaagtaggttccaacagatgtgctggcaagtaagtgcaagaggatgaagaagagtgagtccatatataggcctccagtataagatgtggcccagattaaaggtgagtaccactattcctggatttggaaattgctttgtcccaggctggctttgaactcagaaatctgcttactttagtctcctgggattaaaggcatgtaccttacctgggcctaagctttttaatggccactatgcctcaagatctccatgttcagatctaggtcagaagtccatgtcttccagccttaagatatgttctccatttctggatggtcgttcattccagatgtagtcagagtgacaacctggaatagccatcacacctgaattactttttttatttgtttttgttttgtcttttttttttttctaagagagagtttactctgtgtatctttggctatcctgcaaattaattggcagaccaggctggtctcaaactcacagacatttgcctgcttctgtctcccagtgctgagattaaaggtgtgcatcaccatgctgggcttggatttcttaatgccgtcagtcctcagtagacatggagatcagcaccaggctcccatacaaacgtaaaactccccagtgcctcatgtaaggcaaagcaatatctgcacataacctatgcacgattatttgtacactccagagcatatctagtgtaggtacggtactcattgcaatgtaagccctgtgtaaatagcggttggacattatcattagagaatgataacaacacagaagtctatgcatgctttagtgcaatgcaacttacccagagcaagagtgaccatgctcaaccagtcctgaagagacagggggaggaggcacatctataaaggggcagaaggctactgaggttagatctgtgtgcatggaaagcccatagatccagagggcagaccatatgctgtaattattaatacatctacatatatttggttagtttacttacaaatatttttttttttttttaattttgtgtttgagccagggtctcactatgttgccagggttgacctggaactcactaagtgtctcagccgctcaagtgctgtgaccacagctatacagtcaccttgggctaatgatatttgaatgtgtgtgtatgtgtgtgtgtgtgttttaatttgtacttgtttctactttatagaaatgtaattgaccttatattctgacaccttgtaccctagtgtgcaaatcctttaaaatctctattctgcatctagattaaaacctggcatttgttttcctggatctgttttacgttgcatagcataatgacttccagttgcacccatttcgacccagatgtcatatttgcactgttttcatggctgcataaaaattctgttgtttgcatgcacacatcctctctgttgacggatgtctaggttggttcatttcctggcttttgtaaatagtcccacagcaccttgcgcatgtcttatattgttgttgtttgagacagggtttctctgtgtagttctggctgtcctggaacttactctgtagaccaggatagcctgcaactcacagagatctacctgcctctgcctcttaagttttgggatcaaaggcatgcaccaccatgcccagccttgccccgcttttacaattacatttcatgtatttatttggtgtctttctgtctgtctctctgtgtgcctgcagaggtcacaaggtcacaggatgcctagacatctgttctctcctctcactctgtgggtcctgggattgcactcaggttgccatctggcttggcaggtgacccactgagatgtccatcatgctattctcaaactcacagcaatcctcctgcctcagcctactatgtgctgggactatgggcttgtgccactacacttggcttaaatatttgacctaattctccattgaagctacttgagcttagaaagattatacactggtaaggcataaaatacatattgagatattcaagctatttgctcttgaagaagattaagtaatttacattttctttaaaaatgtcattgtcttgtaaattattagattaatgagctctaagttcttgataaccttcattcttttcttcttcttcttctttaatattggatggtgcgtaatgttgtcctcttgcccattagtggtattgaccattgtgtgctctgcttttttttttttttttttttttttgagacagggacttgatttgtagcccaacatagccttaaacttttggccatcctcctgactcagcccctcatgtattgcaagtccagatgcaacatcatccctgacttgctgtctcaatttttaattggtggttgtgacttgagcttgatcaattttatggatcatttcagcttttggtttcactgtttccctacccccagatctttgtcccatttctatttaactgactttccttctttattatttcttctgcccatttctgctctagttggctctttttgtcttccagcttcttgaggtagatcttcatttatttgagattataattcctgctaatcttgggattttgttttacagatttccccctaaagcattattttagcaacgtcttacaaatcctgtttaaatacagtaccataaataatttgaagtattatcacagtacaaagaaaggcaatggcctttcaataggctgggagaaatggaagaaaagctttagaactgggtgttgaaggcagagaagaaaccaaaagaacaactaagccagggtttgtttgtttgtttatttaaggaaaaagacaaaatcatgagagtaaatgtttgcgatgctattagcaagatgagatctgaaaatggattctcacatttcaaaagtgcttctcctgaatccagaaaaataaaataaaatccaccgaagtcactcgtgcactgaccatcagagtatttgtttgctcgcgtcagggttttgtgtcgctgggttagctgaggatgaccttggactcctagtggtcctgccatcccctctcaagtgctaggatcataggtgtttgctgccatgcctggttacaggcttcgttctaaacaaaacacaacatgcttttcctcacttttacatttctgttatacatcagatctcacagtgtagtccaggctggcctagaacttgctatgtagatcaggttggctttggaccgagtgttaggattgaagactgtagtttttgttttgtcttccaataggtagaaaattcaaattgtctttttttttctttttaaacataatatcttaatttgttctttgagaagtttatgcatgtctgtaatgcattaatgatcgtatcaacccctatctccccttcaactcaactctccccgtccaagtcccccaagacacccccaaaacatcctctccagtatttcttctgtcagtcttgtagttcttaggaccatagttaacaatggagtgtcccctatccacctacattttattatgaagaacttcaaacatagagaaagttgaagagcttaccagccagtttgtgaagtagacagcaaccacccagagcagtggtcctcacctaacgctgggccctttaataaatttcttcctgtggtggtgacccccagctataaaacgatttccattgctactgtataactgtaattttgctactcttatgactcataatgtaaatatttctggaccgagaggtttgccagtggggtcgagcccctcaggttgagaaacactgaccttaagttgtattggcctcttctccaaatctcggttgaccaaggagatgggaaagagcatcagaggtagggcagtttctggttcccagcgcttctggagtgaagtgcctgggtgggcttgagtggtgactgttttcctcaggcttgtgaacttttagaacgtggagtaaagtttcagaatccctttggttcaccgagatggtaaacctgatcctggttccaaataagcaagcactgttcagcttcaattcctcttcagacgctgggctcctaggttctgatgggagcaacttggccagagtgtgcggagaggggagcttcagcatggagcagggcacacagtggcctgtgtttgggttatgcgacaactgagggccagccacttgctcagggtgctctaagccagtgacttgagagtggaggaaaatcttcctccatccttccagctgtgaggaagggtggggccaaagggcactgtcagagttgacagctgtggtccttcacttttgcacccatgagtctgagcagcttcaccttagctggcatcctgctgcgatctgtgaccttttgggaccaagtagagttagaagaaaatggtctggggaatttagaattgtctactgagccccttcagtcaccatcttgctcttgtactttgactgacaggcctttcctctcagcatctttaattgtcctgggctttctgtggaaattccacatttttgagtaacaatagcacctcttagctaggaaagaccgttttcttttgtttcacttcttcttctcctcctgtattaccttcctttccaaaacatttattctgttgtgtttcccaaccactgtgctgagaacaataggaattgagagtctagtggggagtttttataaactggaaactgaatttaaatgatggccgagttagtcaatacctaagcagtcctgaaacattctaactaggataactgtgaattgaacttgtgtgcatgcgtgtacatgacagggagtcttttttgacttaggtttgtttgtttgtttcctgagtgtagagttttgtgtagattgcagtaggtgaaacccagccagtctagttccttgtagctcctttgctacagagcagcccaggagagtattcctgatgctctctacctgggaccatgaatacagtctccttgactgttctgttctcttgagaggcccgctttgttgggaaaggccagcaacagatcagatggctaatgaatatgagtgagtatgcttattatatgcagactcccatcactttcaaaaatactattttatttatccttagaaacttccatacaatatatttggtatatatatttgatcatatctatccagtactactattatgacatttaaacaacaataacaacaacaacaaagatttatgctgggtctgctctgctagttgttgcttttaatcccggtgtttgggatgcctatgtagaaggatttctggtctacacagtgagctagcctgggctatatagtaagcaccagtcagctagagctacatagtaagctcctgtttcaaaagtattactttttaaaattttaattgtgtgtatgtgtgtgggtatgtgcatgtggctgcaggtgcctttagaggtcacaagagctggggttccaggtatctgtgagttgcccctgaagttaagagcagtaagcattcttaaccgctgaccctgatctccaggccccctgttgttacattttatatcagttttatgacatcacacaaagtcattctgttttattgtcatgttactggtgggactggaaatcaaacacaggaccttggcagggaaggcatgatgacaggaactgagatgcttggtctcagtgcactgtcaggaagaagagagtagacaggaagtgaggctagtttatagaccctcaagccttgcccctagtgttgcacttcttccagggaggctccacctaccaagtttggacagtcttccctgacagcgtcaccagctggggccaagtgctcaagcacatgagcctacagggatgttttcctgtcactgtcagtccacattggaaatactaagaaaaggaactagttgtggctatgcacttgggattggttgcagggttagggattggttgcagggttagggattgattgcagggttaggggtcagtggtttgattctcaggcaaagctggatagaagagaagatacaaacaactgtggtggcaagtctagccctgagtagatgctgtacgggatcatgatgacattcaaacaaacaacgaaccaaccaaacacacaaactgaaccaaacctacaacagagacgaactgggaaagatgcagtcagagcaggagcccacctccagatacaaagctctttctttctatgaaagcatctacactcaccaaatccttctcttcttgtctccctccatggctttattccacaccgtctcttgtctctgtctctgtctgtctgtctccatctctctctaacagactactatacatttattttatgagactttcttataggcatgccattctcctctttttaaaaaacatttttattgaacatgagtttcacatcatgtacctcagtttcactcatctccccatccttttgtatctgccctatgccctgcaacatcccccacaaaataaaaacacaataaaacaaaacaaaatataaaaaaaccctcttatctgagaagctgtagagcgttacagtgtgtcccacagtacgttcttttgcctacacatctctatttgcaaatgttcattgtgatgagtcattggtcttgtgcaaggtctctgacttgtaatactatatcaatgctggatcctcacagggactcttcttggatgccctgttgttgccctgtgtcatggagatccgacagctttg

SEQ ID NO: 1259 - DNA, 6499 bp, Mus musculus
ttactgttggagcttgagggagagaaacaaacggaggagctgcggggaaggactggaagcttggggcttacttttcactccgggtatcggattttctttgcaaattgacatagaaggagaaggtctcaggagctatggggacctcccaccaggtctttctggtcctcagctgtctcctcacagggccgggcctcatctcctgccagctcttattaccctctatcctcccaaacgagaatgagaagattgtgcagctgaattcgtccttttctctgagatgcgttggggagagtgaagtgagctggcagcaccccatgtctgaagaagacgaccccaacgtggaaatcagaagtgaggagaacaacagtggcctctttgtcacagtgctggaagtggttaacgcctccgcagcccacaccggatggtacacttgctactacaaccacactcagacggatgagagtgagatcgaaggcaggcacatttacatctatgtaccagacccagacatggcctttgtgcctctcgggatgaccgattccttagtcatcgtggaagaggatgactctgccatcataccttgccgcaccacagatccggagactcaagtaaccttgcacaataacgggaggctggtgcctgcctcctatgacagcaggcagggcttcaacggaaccttcagcgtggggccttacatctgtgaggccaccgtcaaagggaggacgttcaagaccagcgagtttaatgtttatgccttgaaagcaacgtcagaactgaatctggagatggacgcacgccagactgtgtataaggcaggagaaacgatcgtggtgacctgtgccgtctttaacaacgaggtcgttgacctgcagtggacttaccctggagaagtgagaaacaaaggtatcaccatgctggaggagatcaaactcccatccatcaaactggtgtacactttgaccgtccccaaggccacggtgaaggacagtggagagtatgaatgtgctgcccgtcaggccactaaagaggtcaaggaaatgaagagagtcaccatttctgtccacgagaaaggcttcgtcgagattgagcccacctttggccagctggaagctgtcaacttgcacgaagtcagagagttcgtggtggaggtgcaggcctacccgacgcccaggatatcgtggctgaaggacaacttgactctgatagagaatctcaccgagatcaccactgatgtacagaagagtcaggaaacaaggtatcagagcaaattaaagctgatccgggctaaggaagaagacagtggccattacaccattatagttcaaaatgaggatgacgtgaagagttacacgtttgagctgtcaaccctagttcctgcatccattttggatctcgtagatgaccaccatggctctggcgggggacagactgtgaggtgtacagccgaaggcacccctcttccagaaatcgactggatgatctgcaagcatattaagaaatgtaataatgacacttcgtggacagttttggccagcaatgtctcaaatattatcacagagctccctcgccgtggcaggagtaccgtggagggacgagtgtccttcgccaaagtggaagagaccatcgcagttcgatgcctggcaaagaacaacctcagcgttgtggcccgtgagctgaagctggtggctcccactctgcgatctgaactcacagtggcggccgcagtgttggtgctgttggtgattgtcattgtctctctcatcgtcctggtggtcatttggaagcagaaaccacggtatgaaattcgctggagggttatcgagtcaatcagccccgatggacatgagtatatctatgtggaccccatgcagttgccttacgactccagatgggaattcccgagagatggcctcgtgcttggtcggattttgggatccggtgcatttgggaaagtggtcgaaggtacagcttatggattaagccggtcccaacctgtaatgaaggtggctgtgaagatgctcaaacccacagccaggtctagtgaaaagcaggctctcatgtctgagctgaagataatgactcacctggggccacatttgaacattgtgaacttgctgggagcctgcaccaagtcaggtcccatttacatcatcacagaatactgcttctatggggatttggtcaactacttgcataagaacagagatagcttcatgagccaacacccagagaagccgaagaaagacctggacatctttggattgaatcctgcagacgagagcacaagaagttatgtgattttgtcttttgaaaataacggcgactacatggacatgaagcaagctgataccacacagtatgtccccatgcttgaaaggaaagaggtttctaaatactctgacatccagagatcgctgtacgatcggccagcctcctacaagaagaaatccatgctagactcagaagtcaaaaacctcctttcggacgatgactccgagggtctgactttgctggatctattgagcttcacctatcaagttgctcgaggaatggaatttttggcttcgaaaaattgtgtccaccgggacctggctgcccgcaacgtcctcctggcgcaaggaaaaattgtgaagatctgtgattttggcctggccagagacatcatgcacgattccaactacgtgtcaaaaggcagtactttcctgcctgtgaagtggatggcacccgagagcatcttcgacaacctctacaccacgctgagtgacgtctggtcctatggcattctgctctgggaaatcttttcccttggtggcacaccctatcctggcatgatggtcgattctactttctacaataagatcaagagtggataccggatggccaaacctgaccatgccaccagtgaagtctatgagatcatggtgcagtgctggaacagtgagcccgagaagagaccctccttctaccacctcagcgagatagtggagaacctgttgccgggacaatacaagaagagttatgaaaagattcacctggacttcctaaagagtgaccatccggccgtggcacgcatgcgggtggactctgataatgcgtacatcggtgtcacttacaaaaatgaagaggataagctgaaggactgggaaggtggcctggacgaacagagactgagcgctgacagtggctacatcatccccctgccagacattgaccctgttccagaggaggaagacctgggcaagaggaacagacacagctcacagacttcggaagagagtgccatcgagacaggttccagtagttccaccttcatcaagagagaggacgagaccatcgaggacatcgacatgatggatgacattggtatagattcctcggacctggtggaggacagcttcctgtaactgacacgctccgggtatcatcttctccgggagcctcctcgggataaccttaagaaaaccacttcattgcaatgcaaaagttgagaagaggacttgggtgatgtggagagagaaagttcccgaggccgagggccttggtaagcctgtgtggatgactgggatacttggattgaactttatccgtgttgcctcttgcaacgcgtcagtagcatctcagcggcgtgtgcggtttggaaatggatggacaagagagtgactggccacagaagacgggctttgtgtttccagggcatgggtgagagtcccacacgcgccaacttgtactgcagacaactccagcattgtaattatgtaaataactcttaaccgaggatgggtttagatctgtgttaactctcctctccggacctctgaagagaccactcagtccacccgtgtgcttccttccttcttggaatccggtaccagctgctgttgaattttctcatgaagtacatgcaaaaccactttgaactttggaaggtactggaaccgtcgtgttttactgtcttgtaagtgttaaagaggcaaaaagataaaaactaaccaaccgtgagtagtaggtttgggtcttttagggcacccaagaattcctctgtatcttgtaatctgtacttataacactactactgtttaacaagaatgctaaatatgtaatccgtaacatgatttctttacagagaaagcacaattaaaacaaaacccttactaagaaggtgacaagtttggcagtttttgacatttatattaagtaacacgtttctcaataaagtataataggtttagcggattaaagttagcaaacactagagagcagagtgtaagtagttatccagaaagtcaaacctttttgttttgttctaagcagtctccctaatccaaggcactaggaacagttaatgacctctgaagtactgggataagcaaagcagaaacccggtgggtgtcctaagtgttctcagtagaaaggcgtacgcctgagcccagtgtgactcctcacgctgtgtgcgaccttctggaagagactcattcacaaaaaggactcagatgggcagaatgtccatcagatgggactcagatgtctctcctgaccagtgatggcttggatggatcccgcccatacctacttttaaagtctgtgacttttaaggatgcttcaacatcagcaccttactttttctctcttgtctcagacgagaaagaactgcaaaccctgagaccacaatggtgctgttgaatgaaggctatgtgggcatcagcttggctcttcccttcccaccattaactacagctacagttactagcctcaatggtgtcagacctttgccccagagatttggaattacaaggtctgacgggagcaggaagctatatatatgaactgcctggtgctcttgaatagtcagtgttcagaaacactggcttgggttactgttgggggagggcaactttgaaatttggaacggggctagaagtcaaccatgcaggaaggctactgtttaagttcttggcttcatgtcaataacatgtcaatgccacgtatgcagctattcctacccttgatttaagtttccaggcttggctgaggctgagaaagcaaacatcttgacttgggaacatcttcccattctagtcaacgtgggtaccacttccccctggatgggagaacctgagcttgctcgcctcaaagtgtgtccgggaatgatgcaagtctgtgtgtcaggtctttgtgcaaccagctccatattcggtggagaagattaaaaaaaaagttttctgaatttggggcctttaggtggtaggctatcaggagcatccgaactgtcaaagtggttagtgtgagttcattggcattctctgccatgtgtctaattgctgactctgtatgaatgaaacatgggctatgattactgcaatcactgtattgcttctagcaggtgacgctttggaaggcacagaagcaataacaaggtacttgactacctactggcataatctcaatgcaaaccccaactttcccttttcacagtaagtgtgaagactgagccagattggccaattgaaaaacaaaaacctgactagagtctttcgagccaattagacttgaactacatccgtctttctagactcgtggctggagcagtctgtttaccactcatttgcacagcctctgtttgttgcttctttttattctgatgtcgctttgggccttgcatgacaccatgaagttggatgatacttctcagaccagcagtttcccatctttagctgtacccacctctgagattcaatgggaatacgttcacttttgttttttgagacagggtctttctacgcagccctggctgccctggaactcactgtgtaaaccaggctagccttgaactctcagagatccactgtctctgtacccccagtgctgggattacaggcatgcaccaccacactcagcagggatacatttttatttttaaacagtgttttgactgtatcctgatttgttttctttctggcctcctgcagagtccctggaagaaaatttaccaatctttcctgctttctatttttatgatgacaatcaaagcttgcccgaggaacacaatttgtgacttttaaaaaaatgatcaatgatgtccttaaaaaaatgtggtctgccaacctgtacaaaatggtcctatatttgtgaagagggacgtaagataaaacgatgttatacatcgatatgtatatatctgttgctatgtagacttggagaatactgccaaaatgtgtatgacaagctgtatcactgcctttgtttatattttttttaactgtgatattccccacaggcacgttaactgttgcacttttgaatgtccaaaatttatattttagaagtaataaagagaaaaatactgacatgttcccaacatggtggtgtggtaagtgtgtgagagcgacttactccataggaagggtcttccaatacaagatggcttccagatacccctgttcatgttttgttttaaaaagtgtaaatggagatctttatatttcaataaatgatttattat

SEQ ID NO: 1260 - protein, 1096 aa, Mus musculus
KEKVSGAMGTSHQVFLVLSCLLTGPGLISCQLLLPSILPNENEKIVQLNSSFSLRCVGESEVSWQHPMSEEDDPNVEIRSEENNSGLFVTVLEVVNASAAHTGWYTCYYNHTQTDESEIEGRHIYIYVPDPDMAFVPLGMTDSLVIVEEDDSAIIPCRTTDPETQVTLHNNGRLVPASYDSRQGFNGTFSVGPYICEATVKGRTFKTSEFNVYALKATSELNLEMDARQTVYKAGETIVVTCAVFNNEVVDLQWTYPGEVRNKGITMLEEIKLPSIKLVYTLTVPKATVKDSGEYECAARQATKEVKEMKRVTISVHEKGFVEIEPTFGQLEAVNLHEVREFVVEVQAYPTPRISWLKDNLTLIENLTEITTDVQKSQETRYQSKLKLIRAKEEDSGHYTIIVQNEDDVKSYTFELSTLVPASILDLVDDHHGSGGGQTVRCTAEGTPLPEIDWMICKHIKKCNNDTSWTVLASNVSNIITELPRRGRSTVEGRVSFAKVEETIAVRCLAKNNLSVVARELKLVAPTLRSELTVAAAVLVLLVIVIVSLIVLVVIWKQKPRYEIRWRVIESISPDGHEYIYVDPMQLPYDSRWEFPRDGLVLGRILGSGAFGKVVEGTAYGLSRSQPVMKVAVKMLKPTARSSEKQALMSELKIMTHLGPHLNIVNLLGACTKSGPIYIITEYCFYGDLVNYLHKNRDSFMSQHPEKPKKDLDIFGLNPADESTRSYVILSFENNGDYMDMKQADTTQYVPMLERKEVSKYSDIQRSLYDRPASYKKKSMLDSEVKNLLSDDDSEGLTLLDLLSFTYQVARGMEFLASKNCVHRDLAARNVLLAQGKIVKICDFGLARDIMHDSNYVSKGSTFLPVKWMAPESIFDNLYTTLSDVWSYGILLWEIFSLGGTPYPGMMVDSTFYNKIKSGYRMAKPDHATSEVYEIMVQCWNSEPEKRPSFYHLSEIVENLLPGQYKKSYEKIHLDFLKSDHPAVARMRVDSDNAYIGVTYKNEEDKLKDWEGGLDEQRLSADSGYIIPLPDIDPVPEEEDLGKRNRHSSQTSEESAIETGSSSSTFIKREDETIEDIDMMDDIGIDSSDLVEDSFL

SEQ ID NO: 1261 - DNA, 59475 bp, Homo sapiens
  misc_feature (1)...(59475): n = A,T,C or G
caaaagcaatggcaacaaaagccaaaattgacaaatgggatctaattaaactaaagagcttctgcacagtgaaagaaactaccatcagagtgaataggcaacctacaaaatgggagaaaatttttgcaacctactcatctgacaaagggctaatatccagactctacaatgaactttaacaaatttacaggaaaaaaacaaacaaccccatcaaaaagtgggcaaaggacatgaacagacacttctcaaaagaagacatttaagcagccaaaaaaacacatgaaaaaatgctcaccatcactggccatcagagaaatgcaaatcaaaaccacaatgagatagcatctcacaccagttagaatggcaatcattaaaaagtcaggaaacaacaggtgctggagaggatgtggagaaataggaacacttttacactgttggtgtaaaagtgttggtgggactgtaaactagttcaacccttgtgggactgtaaactatttggttggtgggactgtaaactagttcaacccttgtggaagtcagtgtggtgattcctcagggatctagaactagaaataccatttgacccagcaatcccattactgggtatatacccgaaggattataaatcatgctgctataaagacacatgcacacgtatgtttattgcggcactattcacaatagcaaagacttggaaccaacccaaatatccaacgatgatagactggattaagaaaatgtggcacatatacaccatggaatagtatgcagccataaaaaatgatgagttcaggtcctttgtagggacatggatgaaattggaaatcatcattctcagtaaactatcgcaagaagaaaaaaccaaatgccgcatattctcactcataggtgggaattgaacaatgagaacaacacggacacaggaaggggaacatcacactctggggactgttgtggggtgggggtagtggggagggatacctttaggagatatacctcgtgctaaatgacgagttaatgggtgcagcacaccagcatggcacatgtatacatatgtaactaacctgcacattgtgcgcatgtaccctaaaacttaaagtataataataataaaataaaaaaatttttaaaaaataaagttaaagggatattattattattatttttgtaagttaaacattaggattaaaaagcacaacagagttttctagagcactgatctactctgtaacagaaaattgtaaagggtttaaaaggtttatgagaatcttaccttatggtcaaactggttaagattgggaagatttgtctataaagttttattaagaattgggtttgacattaatactacactaatgcaaacgtgaaatgtggctttctctcttgaataagattttcatgtattattacaagataatgaaagatttttatttgctttttaaataaactataggaaaaataagggagagaaaagtgacagatcatttggaaacccaagtctcccctatatcaatgagtaaaagtttttacctttttgaaatctttgagttatcattttggctaaataaatgctttatggtgacctgggattctattttgtaatatcaactgtttaaaccttttgtatttgacaaacgttccaaactgaaattctaatgtaagtctttttctgacctgattagtccttctagatattaggtcccctaaagtccaaaagtgacatatttggcttattagatatattaaaatcatacaggaagcactttcaaatataaaatgctatttggctttctttggactatacttatataaatgtgttattggtatatgttccaaaattatgcaaaactcctataattctgatatgacttagtgtacattatcagtcataattatagttcttatgttacattattgtgtgctacagagttaaccaaatttctttgtcaattgcatctttaatcagctgtcctaagacttttgtcacccacagacaattgtcttgttttaatccttttcaaaaggtggtttataatcagctataggactctgatgggtactctaaaatgcaagcctctgataactttgaaaattgtgccattggctgggcatgatggctcacaactgtaatcccagcactttgggaggctgaggcaggcagatcacgtggggtcaggagttcaagactagcttggccagcatggtgaaatgccatctctactaaaaatacaaaaatcagtcaggcatggtggcatgcacctgtaatcccagttactcgggaggctgaggcaggagaatcacttgaacctgggaggcagaggttgcagtgagctgagatcgcaccattgcattccagcctgggcaacaagagggaaactccgtctcaaaaaaaaaaaaaaaaaaaaattgaaaaagaatattgtgccattgaaacagaaaagaaaacacaaataaacttccaggattctcatagaaacttaatatattcataaggaatgtggcccaatatcaggcaaaacaagagttaacagcatggactaaactaataaaagaccaaaacaatcttttaatgactttttgcttaaaacattgcatatcctttctgttttgcttttcagagtcaagaaaacttttcctttggaaagtatttactgcttttaacaattgaaaaaagtatactactatggacaaaatttggagcatatgtctttctttttacctgatttctccagaatttgaaaactatttgggagtattcttaactaatagcaatatagttatttgcctaagtgcagtaagaatcttttcttttgtaataggacacaattaaagaaactgcttattttatgaaggctttgactagaatggtgtgctttcagatacaaacagactgctttaagggatcaaagttgacttatagagccaataaaagccactatggaaaactggccttattctttgtctatgcagtctctgtatggggttcctgacctgtggtaagtgaagaatgtcactttctgacaggcccaggagccccaagttatcttgggacatcaagaagaaaggaatgcacccaacttatacaggtatttgcaggcacagataaatctgtggctggctcaaggctttaagaagcctaatgtgagattctttttaaattaaatttccatcgaaaccaattttaacaagagcctatgtggcaaataattatttttgctgcactttatacaaataatcaggccaaatttcataagattaaaactttatggcaaacaaatttgtcccactatgatttgtctttggtaaaaatggaagctagagagagaatttgtttcaaaaactatgatacaccagttattagattctagtctcgtctgttgtttttgagtttcttctgcaatttaggcagaccctgcttattcctgagaatcaaccagtgatctatggctgttgctcagaagaaataagagggatggctaacgtaaagatctggattagtattctaattctaggcatgtattagaattggctagtgaccccatatcagcttggttttaacaattacccagttcatggaaagccttcttatttagtttacttgggataattgtgctgattttgttttactgttgtggaatatattgctgttgtcctctttgtgtaggaatgcaggaaaagcttacttaacattttcttaaattgaacacttattaatcttccagatttcaccttttgtcagaactcagagttatgatttgtcctcactgtactgacaacaggctctggtagggtgcagaggtcctggtaaacacaccctctgctggaaaacagggagaagtttccatcagtgtaagcctgcacttgggttgtctgggctgaagttaggagactgagtagaacatttgctgcagaaaaaaaagaagatgtgtaattttcacagttagaattaacttaggagagctgaaattaactgagcctcggaaatctgaatcttgaagtcaccagtggcttttgggactgtgagagagtctcttgtggtctttaatcatgtgagggtggggtgaaattcaatattcagtggttctgcaatgggatgcactgtgcaattggtgattgagaagccaactctctggctttaggagaagaatgtcttgctgttagtccttctggaaatagagccttgcattgcctactgtctgtttacactacctttgcacattgcctttggttatagagtcatgtccaatggctctttacttctgtttgcagggcaggagatggcaccctgttaaagagaaaggatagtagctgcaaagtcatttgtttctctgtttctgtgactgtatatattggctcatctttgaatggtctttatagccacaccaggctggaggtaacagggtcatgggagtggactgctggtgtgggctaaatcagagttcagatccatgtctccaagaggtaggaagtgcagggcaagttatgtggcttctggggcatccctcactttcttagttaaagagaagttgaagtaatcattctgaaatattatgggagtctgcagaaaaagtaatgaaaaccaaagcactttccattaatctccataatttagtccttacgataatgtcacagggcaagcaaccaatcagaccttactagtcgtgcttcctagaagagactgaggttcagagatttggacagagtgtcagatatgggatcagtggctagtccaatgtgatttccatcctttcttctgagagaaagcataagaaggctaagaggatgggggtaaagcacaagtcacctgcctgagagtcaacagagcaggggtctctttctcagtttgtttctctaagttatggcaaaagctttttgagctgtgattattgagaatgggggctgaagttcaacacatagttggcatgagagaagtaattatgattgaagaaatctagatgaaatccattgttcttttctgtaaaggggttgttatccctgattctttttttcttttttcttttttagatggagccttgctctgttgcccaggctggagtgcagtggtgtgatcttggctcactgcaacctctgcctcctgggttcaagtgattctcatgcctcagcctttccagtagctggaactacaggagtgtgccaccatgcccggctaatgtttttatttttagtagaggtggagtttcaccatgttggccaggctggtcttgaactcctgacctcaagtgattcacccaccttggcctcccaaagtgctggaattacaggagtgagccattgtgcctggcctgttctcactgattcttatagtgccatgtttctcagaatttgtggcttcaattacttatatttgtgcacctgacttttaggtgagctccagaatagcattactaattaagaatgagcatttagagtagaaaaagtgacaggaacagcaagactcacttccagaaagcctcactacaggtctaataggtgaggaaagtccccatctttcccatttttcttcattacctccctgtggggcaagcactgccattatgcatgagtaaactgtctgagttatagataagtaatgacatgaaacttcacaaacaggcctagatttctacccagggaaccgctgttatcagagaagggagtttggaatcttaagcaacaaacacatgttgattctcagtatttgcctcctgatggcttgctcagagagcctgttttcattgcccactttatatgtcagtaaataatcttccctggcagtgggtccaccatgtctggatgcacacagggaaatctggtggggtctggccagtgaaaaacactcctcaggttttgcaggaaaagcagtgaacccttcttttaagctcgagaatgctttaaagatgcatcattggcaagccttgccaaagaaatacgggatctaaatgtgataaaagccacgacgacatcaagctggctctggaggtctcctttgaagtttgctgagtggattgtcagtgggaggctgatatttacatgtagaagcacacaagtgttactgctaattgtggtaaatcaggctggccagcctggctctggatcccactgtgcctaacaccagccctgcatcccaggcacatgccgggctcctcagaagcgatcagccagccagcattgtgtgaattgcatttgggttcacagcactgtaattgtccttctcctgctatgaggagcagagagggaaaagggaagggagggttgtgtaatttgccctaggaaattgtgggggagggacaggcactgggccgggtggggggcggtgcgacatggctaaaacactgaccttcccttgagagagaccatatggtgaagtggagagggcacagcttttgcatcacacaggccttgtattagaattttggctctgacaccagctgtgtgaccttgggtcatttgcgaaacctctctgagcctcaactgccccttcttaaaatcagctctaagtaaccacagggttattcttcagaaacacagcatgcacatgcaaactttggcttagtaaataatgatttctttttgttctatctactccacctccctttcccattagaagcttgctacctttcactctgtgttttcttcctctcccattttcctggtggcattcaataaagcagaattctgatttctgcaatgtaggccaccttagagcaaaatacatgatcaggcaccaccaaattaggctattatctactggatcctgtttaaccaacccaaacccaactcaggctaaatacaggaatacaagaaaacgctgaatttctcccctttctttttttttttttttttgagacagagtcttgctctgtcacccaggctggagtgcagtggcgcgatcttggctcactgcaagctccacctcctgggttcacgccattctcctgcctcagcctcctgagtagcggggactacaggtgcctgccaccacgcccggctaattttttgtatttttagtagagacagggtttcaccgtgttagccaggatggtctccatctcctgatctcatgatctgcccgcctcagcctcccaaagtgctgggattacaggcgtgagccactgcgcccttccctccttttttttttaaaacaacaacaacaacaacaacaaacagtttattcagtaattatgtatacgtattttagcttccaaagtcagtgatggaacaaattgagtcctattaggcccactccattgcatgagttagcatcagaggaggtcaaactagagtgacttcatcttgaatatgggctaggtaagaagaggatgaggcctgctgggctgcattcccaggaggttaggcatttgtagtcacaggatgagataggagttgggtaggaatggtttcataaagaccacaggatgcaagctgggtgtggtgccttatgcctgtaatcccagtactttgggaggccaacgcaggaggattgcttaatcctaggagttcaagaccagcttgggcaacatagtgagacctcatctctacagataatttttattttattttattttatttttttgtgatggagtcttgctctgccgcccaggctggcgtgcagtggcatgaccttggctcactgcaacttctacctcaggggttcaagcgattctcctgtactcagcctacctgagtagctggaattagaggcgcacaccaccacgcctggctaattttttgtgtttttannnnnnnnnnnnnnnnnnnnnnnnnnnnnnnnnnnnnnnnnnnnnnnnnnnnnnnnnnnnnnnnnnnnnnnnnnnnnnnnnnnnnnnnnnnnnnnnnnnnnnnnnnnnnnnnnnnnnnnnnnnnnnnnnnnnnnnnnnnnnnnnnnnnnnnnnnnnnnnnnnnnnnnnnnnnnnnnnnnnnnnnnnnnnnnnnnnnnnnnnnnnnnnnnnnnnnnnnnnnnnnnnnnnnnnnnnnnnnnnnnnnnnnnnnnnnnnnnnnnnnnnnnnnnnnnnnnnnnnnnnnnnnnnnnnnnnnnnnnnnnnnnnnnnnnnnnnnnnnnnnnnnnnnnnnnnnnnnnnnnnnnnnnnnnnnnnnnnnnnnnnnnnnnnnnnnnnnnnnnnnnnnnnnnnnnnnnnnnnnnnnnnnnnnnnnnnnnnnnnnnnnnnnnnnnnnnnnnnnnnnnnnnnnnnnnnnnnnnnnnnnnnnnnnnnnnnnnnnnnnnnnnnnnnnnnnnnnnnnnnnnnnnnnnnnnnnnnnnnnnnnnnnnnnnnnnnnnnnnnnnnnnnnnnnnnnnnnnnnnnnnnnnnnnnnnnnnnnnnnnnnnnnnnnnnnnnnnnnnnnnnnnnnnnnnnnnnnnnnnnnnnnnnnnnnnnnnnnnnnnnnnnnnnnnnnnnnnnnnnnnnnnnnnnnnnnnnnnnnnnnnnnnnnnnnnnnnnnnnnnnnnnnnnnnnnnnnnnnnnnnnnnnnnnnnnnnnnnnnnnnnnnnnnnnnnnnnnnnnnnnnnnnnnnnnnnnnnnnnnnnnnnnnnnnnnnnnnnnnnnnnnnnnnnnnnnnnnnnnnnnnnnnnnnnnnnnnnnnnnnnnnnnnnnnnnnnnnnnnnnnnnnnnnnnnnnnnnnnnnnnnnnnnnnnnnnnnnnnnnnnnnnnnnnnnnnnnnnnnnnnnnnnnnnnnnnnnnnnnnnnnnnnnnnnnnnnnnnnnnnnnnnnnnnnnnnnnnnnnnnnnnnnnnnnnnnnnnnnnnnnnnnnnnnnnnnnnnnnnnnnnnnnnnnnnnnnnnnnnnnnnnnnnnnnnnnnnnnnnnnnnnnnnnnnnnnnnnnnnnnnnnnnnnnnnnnnnnnnnnnnnnnnnnnnnnnnnnnnnnnnntacttactggccctagcacctacaagttcattcacagttccttctcactgacttcaccagtgaccactatcagtgacttcaagggagaaatgaggggggagataaaataaagtgaatggggaagagataaagaagagaggtcttttcacagtttgccagaatagtcccttcagtggttttaccccagggcaacaggagcccccttttagtttctttctcttttaattttcttttcccttcccactttttgcccactttttgccttatttgtgtctgactcaatttccgtctctttctctacttcttcattcccagatttggctgtagaaaattagaaagttcttgaacttggtttgcacgggtgcttttactttaacatgaaaatgaatgatcagcctccttctaatttcatcctagagtctactgcatccctcctaccccctgcacaggaatttagtcacacttatctctcccactttctctcccttcttcactttctctattgctcctcctttcatgcttgtacctgcttttccatgccctgtttagcctggcttgggatccagcaggttctccaagggttcctgcaagaaccccggctgggtgcccaggtctgagcctggtatgtgcctcagtatcacaaaggcctcctgtaaatgacacacattgttggaagtttcagaaattctaggtcaaaatggcactgaaatattaaggtatttaccccaacccaagcaacttttctaaaagttgtagagagtgtgacctctttattaattgaaacgtgaaaatcagctctagtttggaagctgagaaaaaatatatatatatgtatttatttctttgttgtttgaattcttaatataaatggtttaaaggaccattgaaaactgcatgcaatcacagaaggttttggcttcaggcagctcccgccatgatcttggggccccattgattctttcatctttcaggcgtcttactgtttgaaccttgaattttaacctgggacatgtttgactaaaatgatgctgttaatattttctgttgtgcaaaacacaaagagaactaggctccagggttgtttctatttgctaatgctgtttctgttgacttttgacttttctagtttcccagagctatggggacttcccatccggcgttcctggtcttaggctgtcttctcacaggtacggagcccagtcctctctgagttccttgtttgggtgtcttgtttttttaagctttgtgctgcatgggtttattaccagtactctgcatacacagtccaaaagagtgaaaagaaatagaaaactataggacgttatccagaatgaccacaaaccttcagttccctttgctgtattgcacttactccatttcaaaaggaatgctctccagtggcagttttagtacatatataatgttggcattgaaatgttgttagtaataatgtctaaatttacttactactctcttccttttcctaggacaaggcttctattagagctggattagataaattcaggaatggtcagctgtgggaggtggcacatctgttgtcccagccccttgagcagctgaggtgggatgatcccttaaggccaggagttcaaggttgcagtgcactgtgattatgcctgtgactagccaccacactccagcaacatagcaagacctcatttaaaaaaaatgttcaaaggaaataaataatagaaaattcttgcccaagaaatcatacttgtcttaaatcataactctcttgaggaaagatgcttacattgcttctaaatctcagagtcacctttatcttctctaggaatcaaattgatagatgaatgtttggctcttggaaaatcttaaaaactttcccaccaaaaggatcattggggtaatttgttgaagtgtgtattggactgtcttagttttcctccagatatttatgcactgcagatgttcgccatgaaaccagtgctcttctattctgaggagttagctcagcccgttagtgtctttgtcttacccatttggatatggtagaattgagcaagaccagagattcaacagttctaagctccactaagtataccccatctacagagtaataggtgatccagatgtacttacaaatcctatcttaacaagctttaggaattatagtggtcatatattgaagttgggtgggagtctcacaccaggttccaagggagattacaaatcactaattaataattaagtcataatatctcttctatcagtctcgggtttcttgttttctaagttctgtgctccatgggtttattatctgtactctgcttacacagtccaaaagagtgaaaagaaatagaaaactacaggacgttatccagaatgaccacaaaccttcagttcctttgctgcattgcacttactctattgcaaaaggagtaagtgcaatttcagtctaaataagcgagactgaaatttgagcttcgaagatgaacttagagttttcactcttgggttttacttaccaattgtgaattaaaatccgtatcatctggcaccactgcactccagcctgggtgacagagcaagactccatctcataaaaataaagaaataaataaacaaataaatccacatcatcctgctttggccctggaagtcatgagggagagacggcatgcccgagggctataagaaatggaagatgtggaattcttgagcacagatgtgctttgtgttttcttcagtctgtgtccttgcctccattcttattccatgtgggttttttttttttttttttttttttttttgagacagggtctctcgctctattgcccaggttggagtgcaaaggctgactgcaacctcaatcccctgggctccagtgatcctcccacctcagcctccaaagtagctaggactacaggtgtacaccagcacacctggctaatttttttatttttttatttttgggggagaccaggtctcactacgttgcccaggctggtctcgaactcctgagctcaagcgatcctcccacttccacctaacaaagtgctgggattatagacatgagcctttgcgccccagcctcttttttttttaactaaaggaaacctttgcagtgattgtgaaccataaagaacccatatgtgcttgagcccgtgccatcttgggatatttttatggttacacataagagtctgaaatatggaattggaatcagacatcctctgtctatttgagtgtttggaggggtgaatctagtggggcttggtggagctatttggaacatttgctgctctcagcagatgcagtggctgttataatgggggagctttcatgggcatccaggctaacggatttttgtgtagaaatggtcattgttcatctaagctgctactgttgcttctctcagttgtcgggatgagactgtcctttctgactgcatcctattcagagcgtgcttccttttgcagggctgagcctaatcctctgccagctttcattaccctctatccttccaaatgaaaatgaaaaggttgtgcagctgaattcatccttttctctgagatgctttggggagagtgaagtgagctggcagtaccccatgtctgaagaagagagctccgatgtggaaatcagaaatgaagaaaacaacagcggcctttttgtgacggtcttggaagtgagcagtgcctcggcggcccacacagggttgtacacttgctattacaaccacactcagacagaagagaatgagcttgaaggcaggcacatttacatctatgtgccaggtgagttggctgggtctccaggaccaagcttcttctcttcctgtctctcctgttaaatgtactaaggttttaaacatatatataaataattaatatttattgcgggaagtttgaaaaatgtaagcgaacacacacaaaaatcatttgtaatattatcaagaaatattcattgttagcatttcagagctgtattaagtttggaaagtcatctttgttatgacatgtcctgtattgatactgtataaacaatctgaaatatactcatctctattcagttcattcaagttgcacacatactcacagtgtgtccagcactgggctaagtgttgagtacacaaaaattaataggtaagccctgtcttggagttgctgatagttcattataatatcttccaaataaacactcgatttttcagattcactatcaacatacatttattcttggagagttggaaggaattttctttttccttttaaaaaagttacatatatatatatatatatatatatatatatatattttttttttttttggtaacagggtctcactctgttgcccaggctggaatgcagtggcatgatcatcatagcttactgcaatctcaactcccttggttcaagcgattctcccacttcagcctccccagtagctgggattacaggcatgcaccaccacgcccagctaatttttatattagttgagacgggggtttcaccatattgaccaggctggtcttgaactcctgaccttaagtgatctgcctgcttcggcctcccaaaatgctgggattacaggcgtgagccactgtgccctaatttttatttttatttttgtagagatagggtttcactgtgttgcccaggctggtctcaaactcctgggctcaagtgatccacagccacctcagcctcccaaagttctgggattacaggcacgagccactgggcctggcctactcctgcattttaattaaaaggacaaaagggtcgagcacaagtgatggcaatttcagtatgcagttgggtaaattaaaaaggactatggctagaatccttggttttagaacaaaacctaaactgtttatgattcttgccatccttgctgttttggcataggtgtgtcttcctacctttctgccttttctttttcagtttttaatgggctcctcttcctaccctctataactacgagtgtccccagggatctagaccctctttactttttcatgatactcttattcatatgaaccttccttcttaacaattaaaaaaaaccaaaaactttgttttgaaaagggaaggtatttagaatgtcactccaacttcattcacacttagattccttcaggaaaatcctctaggtgtggagggattttcccctgctgtgaagagaatggtaggaacgtgaatgtgttaaaggcacacgagtccctgaagttttaatccgtgtaagattgtccaaaaattcttcttgttccagcacagatgccatccaagtagcccctgcatcgctgtctgactgagatctttttattcgcaatcatgcagacgtaggggccctttctgcagctgatgtttgagactgttagaacttcttaccaccgtagcttaagtagctgtttttcttttggaaaggaaattctcaggctccttctccttctttaaattttatgtatttctcaaaggattactttttaataaacagatttctatgctatttttgaatcatactgactataggtggtaagagtttttaaaagcatttcataataaaactcgaaatattttttcctgttttaaacagagttggactgtattattttattgttaatttttgtttttagttgtttaaattttgatttagattcctggttagtatttatttatttatttgtagagacagggtctctctatgttgcccaggctggtctcaaactcctgaacacaagcaaccctcccaccttggcttcccaaagtgctgggattacaggcatgagccacaactcctgtccagtattgatatttatcatcagtattatccatcaggagacaggcaatttggtattattcatacttaaaaatcactttgtagctgtcatgataactaatgccagtggggcaattcttctggatatatgtgtaaaggtgaacttcatacctaatatcaataatgccagtgggatagtttttctggatttatgtgtaaaggtgaaattaatgtctaatagagtcttcattcttttttaaaccacagacccagatgtagcctttgtacctctaggaatgacggattatttagtcatcgtggaggatgatgattctgccattataccttgtcgcacaactgatcccgagactcctgtaaccttacacaacagtgagggggtggtacctgcctcctacgacagcagacagggctttaatgggaccttcactgtagggccctatatctgtgaggccaccgtcaaaggaaagaagttccagaccatcccatttaatgtttatgctttaaaaggtacttgtatcatctccttccttctttaaataagagtaacaggcaaaatcataaggtgcgtgtaggatttttttttttttttaaatcatcatcactggtgatcctaaattctgatttggggatttaggaccccagctaatacaatgtctgtggctataataataagcttaaaattactaaaggccaaagcttgattacccatgcaagatttcatgtttcatcagttgacttcaaaatactgtaaggaattcttttcttacataagcctcttactttcattcacattcctgactatggcggccctaaaaacaaacatacacccagggggttagatgcctagattaattttagtaacttaagaaaagtgatttgaagaaagtagtttagacttcaaccctttgatgtccacagttagtacgcttggggaagtataatacatgctgaggtcaacagatatttcctgaacactatattacatggaggaatgggtagcagcaagagtacactgttttaaaatcagagcacagctaattttgtgccaggcactgtgctaggttctgggaaagtactgagaataactgaggagcagagtggaagagaagaagagaagaaacaattggatagaaacaaagtgtctagagcagtgtggatcagcaaatgttggttgattaaatgaataaatttattagtcaaggagattgtggacgagtataaccataactaacccactgctgaggaatgcggtgttctgtttgattggaatttatttttattgttattattttgtaattctgtattataactatatgcctaattgttgtacaccatctcacaatcaagccttgtgagattttccaaattttatcttgatcaaactggtttgcaaattatttttcagggttttcttaaaaaaaaaaaaaaaaacccaaactttataagatcctggctatcctgtggatttttaggcccttgtatttgttcttttttatagcaacatcagagctggatctagaaatggaagctcttaaaaccgtgtataagtcaggggaaacgattgtggtcacctgtgctgtttttaacaatgaggtggttgaccttcaatggacttaccctggagaagtggtaggtaccctcaaaacgtgcaatggcttggagcagagcaacagggctcagaagacctgcatttgagctcggtctgtcactgatgggcacatcactgagtttctctagaccttagcttcccacctctgggatgaacacatttgattaaatggcctttaggactccttgatcaatgggagagtttgaaatgatagttcctggaccaggcccttcagaatacataaagagtgtgccgtaagccttctttttcagaagtcagacagaaataggaaggttctctggctacaagatatcaaccaaaaaattagaagagcaaaaaaaccactggattttactattgcggagacagtgattgattctcatcgtcttggcttctgtgccctgaggtttgattcatctgatagtgttgattgcccgcaccccttcctcttctgccttgttggcacccaggacaatgtgtcttcctgttccacctcctatgtgcctgacctttgcatggctcaccttcagtgaaccgttatgatgtaatcattcagcaaaggtttaatgaagtttgctcaatcccaagcactgtaccagaagctggttcagtattgcaggaagaagggaggaggggagatggaagtggggaaggggagccaccatgctgcctcttggtcactggagatttacagagtctcagtcattctaatgcattgtcactaagtgtgtaagacagccatgtgtaagaggctatgaatgcccaaatgcaggaatgactaatattcttatggagaacaaaaacgagatatatatatttcttgcctccactcctgacttgtaaatttctgctccctgttcttttaggcatttgacagctttctgtccttctatccattgatctccctccttttatccgtttctctctcccatgcatttgccgctgcttttcatttgtcctggggcatctgataggaagttgggcattttcactattgcctcacaaacttcacacagtgaagggacatttacagtccaacaaatgtacatcttccctgaaatatgaagtgatttggttcttctgttcatacttgattgactttaatccttaacacataaacactgctttctatttataggagacagcaatttttttttccaaaccgaagtacatgctatttggcttacaaatatataatcaaagtattgtttcatacagtatgttttttccgattataaaagtaatgcaggtttattgcagaaactttgtaaaatatggagagacaaaggaaaggctacttcccagagcatcactgtttatattttagggagataaagcttttatttttcatttgtatttctttcttttttttttcttttttcttttttttttttgttgtggagatgaggatctcactacattgcccaggctggtctcaaactcctgggcttaagtgatcctcccaccttggcctttcaaagtgttgggattgattacacatgtgagcctctgagcttgactgagataaagctcttaagtatttcttatccatagataaacattgaataataggtgttattctttaaatggtaatttattacattctttatccttcagcagtatagcacaaacaccttatatgtgtcattaactgtccttttaaaaaatgggctgggtgtggtggctcatgcctgtaatcccagtactttgggaggctgaggcaggagagtcacttgaggccaggagtttgagatcagcctgggcaatgtatcaagactccgtctctacaaaaatttttaaaaattagccaggtgtggtggcatgagcctgtagccccagctactcaggagactgaggtgggaggatcacttgaacccaggaggttggggctgcagtgagccatgattgtgccactgcactccagcctgggcagcagagtgagattctgtctctaaaaaaattaaaaacaaaataaaaaatctcatgattttctaagcagctagcttttattctttaggttttatcttttagagcagttttaggtttacagcaaaattgagaggtacagagatttcccatgtgttccctacacccacacatgtgtagcctcccaccttgtcaacatccctaccatccatttgttataactgctgaacctccattgacacatccatatcatccagagtccatagtttatcttagagttcactcctaggagcgagctttttaaaagtcggttttcttccccttttgctgtagaaaggcaaaggcatcacaatgctggaagaaatcaaagtcccatccatcaaattggtgtacactttgacggtccccgaggccacggtgaaagacagtggagattacgaatgtgctgcccgccaggctaccagggaggtcaaagaaatgaagaaagtcactatttctgtccatggtacattccgctttctaaaatgtcagttgtccatgctgctcgggatccatatgtggtaatcattatttaatggaaactcttccctgtacagagaaaggtttcattgaaatcaaacccaccttcagccagttggaagctgtcaacctgcatgaagtcaaacattttgttgtagaggtgcgggcctacccacctcccaggatatcctggctgaaaaacaatctgactctgattgaaaatctcactgagatcaccactgatgtggaaaagattcaggaaataaggtaaagaaactctctgcccaagtatgcctttttttagtgtgcatcagaggcggactgaggtttgtgtgtgtcttacaacccagacccaaagtcagtctagaaaatgtaacaatctgagttaagagatgcttgaaatcacatccctttaatgataacattgcaaagtggtattagtatgctggtaagtatttaatgagaagatgagaagaaagaactaaaagctctggcccctggggaaagacaggtcactggattcagctagggtggaagaaaggaagtaaaattggactcaccaggattgaatagattgaatatattccctgatgttcatcatccatatcgcaagtagacagatatggtgattacacccatgaggcagttatcacatcaccttacgtgaaagttaacgtcataggcttaatctggaacccatttgccctaattgaggactccacaggaaagaagagtagagcctggctaatcaggagagagatgtgcagtgagttgcttggatccctaccttttaatcagaatggtagattgctctcatctcttaattggtggtggagttttgaatgagtcacccctcagccacagtttcctcatctacaatgtaggataaacaataccttatgtccttcaaggcaaggaattggatcagatgatatcatgaggcctcttaaggttttaagctgtgattagaacccaagagtcagaagatacatctcacagcacccagctaaccagccctatacttttgtcagaaatcatctcagaaagacaaagtcagtcctgtatttcaagccttcaggaggaagaacagagcctttctcatcagttccattcacctcaggatttgctttcttctttgtgaactaaattccacgtgtaattgagaagcaatgtctgagaaaatggaattttacagcctctatagaatagtaaaggaaaaatgaagtgggatactgaatctggaaggctttctgttgacacaaaatgaaggtgtacaacaaggagggcagctttccacgaggaacttccatgaggctgtgcagccagagaggaatagggtaacaaccctggtacagctaacacctccaacacgtgtgtgagcactgtctgcaagccataatccatagcagtggcaggacaggctcgccaactgagtggttctggaaagctgccttttccttttagtgattcaaggatgcttcaacgtggattttttagttcctgttatgagccagtgaatacaaagatgaacatggtagatgggggatctggcttcctggagcttaaaactccaggatgggggatctggctttcctggagcaagaaaaccagtggttttcttggccgaagaagtgaagagaacaaacagcagaggataatttggtaatcagcatcctagtgtgccccagggtactctcttaaggaaatccagtcctggagcacacccagtatggtccagcctgctgtcttcgtaggtctgagtgccccagtatttgcaaagtgttttggagcctatgaaatgctttcacacatacaaatctcctttaattaactctcacaatgactctgtgctatgtgtacaattatcacgttttacacacaaggaaactgaggcatggagcattgtaataatacccgagatcttctcactccatgaccaatgcttttcttctccattccagttgctttttcaactgtgatgatttataaaggacaatcaaatgggcacatactatatttatgcacatacatacacacacacacacacacacacacacacacaaccagatgtcatttataatccatgtaaaatatttttggggaagtttctctttaataaagtttgaagagacatatattttttttttttgaagaggcatattttttctaacttttttttttttttttgagatggagtcttgctctgtcacccaggctggagtgcagcggtacgatcacggctcactgcaacctccgcctcctgggttcaagcgattcttcagcttcagcctcctgagtagctgggattacaggcatgtgccaccatgcctggctaatttttttttttttgtatttttagtagagatgggggtttcaccatgtttgtgaggctggtctcgaactcctgacctcaagtgattcacctaccttggcctcccaaagtgctgggattacaggtgtgagtcatcacacccagcctataacttttttttaataggtgatagaatcccgtgcttgaaaaataatcaaacaaaaagagaatgcattgtaagaagcctcactgtactcctgtccccagctgcccagttctcccctcctccccacagggaaacatcttcattagtttcattaggttcttatgaaaccttccagagtttctttaagcaaaatacaagcaagtaggactgtcatatcctgcagaccgctacatacaaatacatagaaagtgtcctcattctatcctccagtgatattccattttttggctgaaccacctaaatgatggatatttaggggaagcaagtattttttaaaaaaggtaaaaatcaaaggtttttattttttatttttttaaagaaaagttggtaggctgtgtttattcattcagaagtcaggccgtggctgaactgatagctcttggagatggccattgctcatctctgaatgtctggttttctcttgtaagaattgtgtgtatgatccagaccttcagtgtgtgcactatatattgagaattccagaagagatgatatggacaagaaaaaaagatgactttactttttacagtaaaaataaaacttaaattgaagagtacaattgtttaaacaattggaacttacttagctactgcttgttgaaacaaaatcctttttttaaaaggtatcgaagcaaattaaagctgatccgtgctaaggaagaagacagtggccattatactattgtagctcaaaatgaagatgctgtgaagagctatacttttgaactgttaactcaaggtatgtaaagggagtataaagataatgctagctctgtagatgagtgtcttccaaggaaagcctggcacttttctccccggtcatggaagaaaagcagcacttaggggagaagcagtgtctgcatatgtcacatatcgggaatacctctgctggactcatgaattcaggtatttctgggaggttctgggttactctagagtaggcgaggaatccctaggctccaccagctagctttatttttgtagagatggagtcttgccatgttgctcaggctggtctcctgggttcaagctatcttcccaccttggcctctcaaagtactgggattacaggtgtgagccactgcacctggcctccaccagcttacttagcacctgcttctcaatctgagaagagagaagcagatgaccttagattgttctggagagttttgctacaagttttccttatagacattgtacagtggtccttaccagaagggagtgcccaagtctgtttacattcaggctcagcacctatccagagtcccagccatgagccaggtgctgtctgaggtgcgctcatgtgatcctcacagtaaaacctgtgatacaagcaacaccgtatatctaatttatttgaccacagatttagaaaagaatctttaaaacctaataacataccacagatgcattttggtaaatgctgctttagattatactttagctgaatccattagttgaatcctaagctataatataattttaagaacctccttgcctttcaagccaaataaccaagggactttctctctctctttccctccctcccttccttccttccttccttcttctctccctcccttgttatctcttttcctttcctttctctccttccttccctcttccctttttcctttctctccttccttccttccttgcttccttcttccctccctcctttgttctctcttttcctttcctttctctttttctttccttccttccttcctcactcactcttttcttttcctttctctccttccttccttccttcctccctccctcactctctcttttctttgcctttctctccttccttccttccttttcctccctccctccctcccttgttctcccttttccttccttccttctttcctttcttccttccttccctcttccctcactctctcttttcctttctctccttccttccttccttcattctcccctcccctcccccctcccctccccccccccctcccccctccccccctcccctccccttcccttcccttcccatttttcttctcaccatgttgcccaggcttgcctcaaactcctgggctcaagtgtttctcttccacctcagcctcccaagtagctggggctacatgtgtgaggcatcacaaccatggacttttcactttcttcactccaggttaaaaacatcacagggataaatctcaaaacaccaaaactgtgaaaatgctgctaaccatgtgggtctgtctaaactggagtgttacttgtacaactggtttcagcccctccggagtgttttgaatgccatgtagatgagttgtgaactcatattccactttgtagtctcatatgttctgggacacgagctattccattctgacttctttctgcctcttgcagttccttcatccattctggacttggtcgatgatcaccatggctcaactgggggacagacggtgaggtgcacagctgaaggcacgccgcttcctgatattgagtggatgatatgcaaagatattaagaagtatggaaaacagatgtgtcttcttctttcgtggtcagaatatttctcccttgacacaaatgatgtcaaatacattttacttattgactataagatagggttttgggtgtgatagcttcagggtgtgtatcttttgtcatgaatagctgtgagaagaaggtccagggctctcattagaccttcaaaatgtctccaatctaaaaacaagagtgaattttaagaaccactgttctaagaagatttttactaccctggctcacatatcttatttggtgaactttgtttggtagtcggactgcatgtaaacataaatgtgactgcttagtcccttatctgcccacctgctgtttggtgggttaattcgccattccctcctccctcccccgagtcctcagccttcttaaatgggcacatgagcaatgtgtttacacttcatccatggtaactggttgtgttcagaagcctcagttgtttcttcctctagacagagactcctcatcttaacttctagggctaagaacagacttggatgttgactggggtttctagtagattccagtgtggagcaggattctaggtcttataactcaatctgaggatcatcgcaaccctagtgacaccctaggggctcttcccagtgtgagtgttgagaagggagggctccaggcctttttgaaggggtgggagattgagatcattaaatatggttgaagttgaactgttcagtttgctcataggttcaagattggggaatggtagtcatattttattaaacttgattatctctgcctgctatgtaaacacttagctttcagttgttcatgtgtgagttattccctcttcagcacatgcagacaagttttaatgttcatctgcatgtaaaataaatcagtgtgtattgccccgaaatgcagacaaggtcccaactccttgccatcttagagtgttcccgtggctccactcattgccatgactctcaggaattggccctatacttaggccctttttctctctagatgtaataatgaaacttcctggactattttggccaacaatgtctcaaacatcatcacggagatccactcccgagacaggagtaccgtggagggccgtgtgactttcgccaaagtggaggagaccatcgccgtgcgatgcctggctaagaatctccttggagctgagaaccgagagctgaagctggtggctcccagtgagttcctcaacagtcaggacaactcatcagctgagccgcatctgccccaggcggaactttgaatcccagataggggtcatatagaaatgaaggtcccaaggcagaaattcagttacgaatgctcttaaaggcatgtgggactttgttttattttgttttgttttttgagacagagttttgctctgtggcccaggctggagtgcaatggcacaatattggctcactgcaacctctacctaggacgttgttttagattcagatccaaaactgcatttttgcagaggcccctcaacattttgcttgtctaataatatagctacagtctctactttgaatgtctgtgtatgtggatggagtgtggggaaggatcttctgtctcattgctccttaaaagatagatgaagccaaaagcaatataagcaaaatgcaacttacaaaataagctttataataaagcatatgaagtagaggtgtctgcccatatagtagctgtcaattgcatttatcctattcaaattctgtccacaaggttactgttggagcaactttggagaaaatactgagttctcctgattgaattttgtccccttcttgtataaggaaagagttgatgtagtttcctgggtgtagatggtttgagagatggtactgcctatccctaaaatgaaccaggcagccctcacacttccccaccagcagtgagagattcctggctcagacacagccacactaccttgctgcccctgtgcatgtctgccaggaaacttttcattgtgcctctctctcttgtcacgtagccctgcgttctgaactcacggtggctgctgcagtcctggtgctgttggtgattgtgatcatctcacttattgtcctggttgtcatttggaaacaggtagatattttctcataaaactaaagatctttgaagccaatgagaacaagcatagcaacctagttcagtgcttggcacagagaaggagctcagcaattacatgtggagtgaacgttgttggactctactgtgtccagtcactgtgctgcttcagtgaagctctggtgcactgggactttggtaattcaccagttacctgtcctggtcatttatagaaaccgaggtatgaaattcgctggagggtcattgaatcaatcagcccggatggacatgaatatatttatgtggacccgatgcagctgccttatgactcaagatgggagtttccaagagatggactagtgcttggtaagttccatggggtaacctcccaagactcccttttcccttgcacacaactttacaatttataggccttggcagaatagagatctgagcttgtgcttagtaagaactaggcaatggaaatttgctttcagaaatacatttctgtcttgacagtaagttaattggatcattgcaatgatttttttaaatctctttccataacaaattatagttaaggaaaattttacaaagggagaagagaatatgaagagggctggcaaagatacccaccaaaattgcttttctttagaaatgacacaaattgaaaatgaatttctgtgactaaaaatgagcagatgagaaatgaatgaggacaaccacaaaatgtattttgattcagtacattctgaagatgcattagatactcctttttacatatttggaatatggaatataaaaatataggtacattttgaggcaaaatatgtaaaaataagcaagccaacttatcacaagcatttcaagtatttcaatcctgggctgagaccaagtatatgaagctttagtccaagggagtatttcttttttaaatcacattcctaatgaatgaaagcaagacaaaggcaaatgaaagtagaggtagaggttgtgttatgatgaatgatctaacagtatatatgttaaagaatgccaaatgcaggttttaattatccaccggtctcattgcaaaatacagaagagtttaagtcttcttagagagttaggtaaactgaaatcaagcaaggcaccagagtgaaatcacctttgcaaaaattgtaactgaggaaattatgacagtgaatgagatatgacctaaccaactccattttgctttagcctccaagttgtccttgttccttcctgggcataggccgaactaactttgagaggaacttagtttatagtttgactttgaaaaaaagacaataatagccctttgccaaaacaaaccctctttttgcctgggaactagactgcctttgcgggactaacgaattagctacaagattagaaagtatggtttaggggtcactgttgtaaaacctgaggtcagtgcttgagatattttggagaccctgtatttcgatgcaccagctgacaccacccaggtcaataaactggctcatctgatcttggggcccctacctaggaactgactcagtgcaagaggacagcatcagctccctataatttcatctttgacccaaccaatcagcactccccttttcaccccctacccaccaaatcatccttaaaaaccccattcccccagtttcagagacactgatttgagtaatagcagaatagtagaaattcccccagtttcagagacactgattcgagtaatagtagtaatagtagaataggtctcccgtacagctggctctgtgtgaattaaaccctttttctattgcaattcccctgtcttggtaaatcggctctgtctaggcagcggacaaggagaatccatggggcggttataagagctgccccccaatttcaaatatttatatctaagctttctttattttcctgcctatttcccaacaagggatgaggagcttagggagttaaaaagtagtaaaatatggggaaaagggcataattcccattataccaagaggcattgctggtgaagcaatacctttccaggtacgattttcagtaacacagacgtgcagtaagaggcagtgttggctgttagtgtcttttatgagccaagtcttttcctggcttggctatccgtggtgagactgacaccccgggaaatgtttctctcagggtgagctctttcagggtgggacaacagcttcagtgtctttacgtatgtctcctcccaacatgaagctaattgctgtgctctcgggcatgtttagctcttggtagagtggctttcctaacaaatagggagcagtgagcccagcctgaagtttttatttagtcactccttagaatcagtgatattttgaatactgaagtatttccagtggctagtaatttactaagacaaaagatgcccctgtttgcatatggaaaacagaaggggagagagccaggaggtgtgggtgagagccccgaaggcaagaggatcccaggggctggcccagcacggagctggtagacagcgcgctcacaccagggagggctgcaccctcctttctcccgtctgtgttttctttcccttgcaagtgttattcgacaaaagcaattatgctaatttccttccctgtgggctcaattccttttttgacacgatgacttggaggagtcattatgattactccaaacaggaaagacactcgcccagctgtccgcccgcagagagctggctacggtgcagaaagctgaggaggcgtctggagtttttgggtgttaatgattctgcctgcccacaggtcgggtcttggggtctggagcgtttgggaaggtggttgaaggaacagcctatggattaagccggtcccaacctgtcatgaaagttgcagtgaagatgctaaaacgtaagtgctccttcctggggattttttgagcacggggattttttgagcatggggatattaagggaatttctcaaaatcatgcagctagtaaataagacatttaggactaggtcctgattattttgactccaggttttatgtgtatttagattaggtttatttagattgctcttgctgcctgtatgttggaaaattaagagcttgttatttccagtgacttctttttactagaaagaccaggaattagttattagcactgaggccaagtagctatttgcttcttttagacttctggtaaatagaatgatatccaatcacaggattagtcatattcttggtttttttctgagaacaggaagttggtagctcagctggactgatatgtgatttattctttcaacagccacggccagatccagtgaaaaacaagctctcatgtctgaactgaagataatgactcacctggggccacatttgaacattgtaaacttgctgggagcctgcaccaagtcaggtgggctcactgacctggagtgaggattttcactggacacatgtggttgtgaaaactgttcaatcaggcttaaatcctccactctccatccccacacatggcagggaatagaagtcccttgaatggagctgactggtcccttgaattgatggaagctcattggtttttgagcaaaatctgttgccagtccagtcatagccattcatggctctttattaaaaaaaaaaaaaaaaaaaaaaaaagcttttttggtatcttatttttttctgcgccatatggtctgcaggacaattcatggcttttctgttcttcattttcatacccatctcctaacggcttttgtccccataggccccatttacatcatcacagagtattgcttctatggagatttggtcaactatttgcataagaatagggatagcttcctgagccaccacccagagaagccaaagaaagagctggatatctttggattgaaccctgctgatgaaagcacacggaggtgggtgcaaagagagatgttgctgtctatcattatcttacaggcatcacaaatggaaagacccatgtcctgatagatatcatgtctgcagattcagtgcccaaggtagcaagacttagagtcaaaccaccctgtccagtctttccatggtcatgcagagagatgcatgatgtctaaaggtgttttggactggggtgtcacatgggaaggccttgctgataggtttgaatgagagtgagttagaatgactctgggagctcttctgctatttacatgtgatccacttagacctataaaatgcagctctggccagggatgcttgagttctggaaccttgcaagaactgtctgtggatctccaagctcgaggtccttgctgaacctggacctataaatgacgtcaatgatagtgatccctactgcagaaatctacaagtggctataaagaactctgtaggtaagaaattctgtaagatcagaaagtacaatgaattcacttcataataaattacttggtggacaccaaatgggtgctaaattgattgggtagaaggaattgtatgcccaagccacatgaccacacggctcaagttccaaccaaggcttgtgagttgaaaaactgagaaagaataatgacagacttaatgtagtgaattcttcaaactttaagtgtaatggacttacaggtccatgggagcacagccccactgtcttagatgtggctcttcaggatgtgcgggctcctgctaaagatgtgcagggaactggctctgaaaacaagtgaacagtagtcatcatggcagctgacatttgtggagtcctttgtatgtgccaggtgccatgacaaatattccgctagtctttcccatctttgtcagtgggatccattctacgtcttctgaaaagtgcttccttgacccccagatcaagtcattttccttacaagctattgaaacctttcttccttcacaacacagctgagtttgagttgatctgtgtatttattttgttttttacatttctttttttccctatttaaaaaatttttttatttccataggtttttggggaacaagtggtatttggttacatgagtaaattcttcagtggtgatttgtgagattttggtgcacccatcactggagcagtatacactgaacccagtttgtagtcttttatccctcacctgcctctcaatttttccccgagtccccaagtccattgtgtcattcttatgcctttgcatcctcatagcttagctctcacttatgagtgagaacgtacgatgtttggtttccatttctgagttacttcacttagaataatagtctctaatcccatccaggttgctgcaaaagccattaattcattcctttttatagctgagttacatatatatatatatatatgcacacctacacatacatatgtatagatacactgcagtttctttatccactccttgattgatgggcatttggggttggttccacattttttcaatatgtgaattgtgctgctataaacatgtgtgtgcaagtatctttttagtatgacttcctttcctctggtagatacccagtagtggaattgctgtgatgcatgtatttgtgcgactatttgattaatgctcatttccttgactagatcacctcatgtgaaaggtatggattggttttgcttttacccagttagctcccatgcctacctcagtacctggcacataatcatcatctactgaaagtggaatgaccacttcagaagggcaccctgggtaagatttctctttctgtttttacagctatgttattttatcttttgaaaacaatggtgactacatggacatgaagcaggctgatactacacagtatgtccccatgctagaaaggaaagaggtttctaaatattccgacatccagagatcactctatgatcgtccagcctcatataagaagaaatctatgttaggtaaaagtgtctatactcactctgggtgttgggactttccagtggtttaatatgatacttaaagtatttagagggaagtgtatagggatggtaagtgaacctggcagcccacgtggtctctaaatgcaggtctgcacaaccagttctgtgacatgtttccaggtttgtggcctgtaaattgaaaagaataaaagctgacaatgtaacaaattttttaaactttaaatttaatagttttaaagaattttcttggtgtgttcctgcagtaaacattttaaaaaaaaaataattatttattctgatataatgaacttccttttttattgctgtctttttcttttttaatgaaaatatggtgattgattttttttaatgcccttacttggcagaattacaagttggctgtcttatgttggttcctcaccttgctttttttcccttaagttttagaagtctctgatgtctatgagttcagtaacccttgcttttacttttcctaacattcaatttgtgataggaactctagagtagataatttgcagttatattttctggaccagtgtttctgttgaatgtattttgaaggtgggtctatctgtttttcaagtacatgaatatgtggcagggttaaattgatttataaactccagggagtccagctgatgcccagaccagatggatcacttcacatctgctcagggtggttcctccagagccctgaactggtcacagacatgaagctggaagtctgacattggcttgtcctgtgagcttgcctttttgggtctgagccttcccattagtcaatgcaaaaaagtgttgagctgccctggacattgttttggaaattattgatgtgctctgaatgttttcaggttcttaagtgaaaggtacaatccatttaaaaaagaatgtgtttgttttgcaaagctcagtacacaatattttccatttctgcggttccaagttccattcacttctcattgccaaatgggtgaacttccaagcgcttttaaaagattagccagtgagagttatcggaaccagtacttcctctcccctcccatattgttaaaaatagtttacattgcttcccaggctgggctggtggagttggcacgagatgtcagaggaacctgagtcatgctcaggcccaagccctgttggcaggcagaccactgctttctggccttccgtgactatctgaaaaaaatcgtgaatggctagagctactcttcacttgctgaacattttcaaaaagaattgagaacttctggattaaattgccttcttcctcgaaaaccctgggacccttccagatgggactaactggggaaagtggacaagttacaaacaaagaaactcaaaggaaagtcattggcactgatctctaagatgctatcacatgtgattggtggttgattttattaacaaattataagcaaagtactacaaaggtggctttaaaaagaaaataaagcaattcacagaaactactttttcatgtagcttgtatgtgtgctccatgtatttcatcatggaagattttagtgtgtgtttatgtgtatgtgtgttttaaaggtagctgagatgatttgctaattatggttgaaaaaaagaaatttaggaggtaaacaaaataattatgtgtaagattggtccttgtggctgtgtgtgtgttttgtgtgtgcgtgtatgtctctgtgtgttttaggctgttcttttattgctataaataaatacttgagactgggtaatttataagggaaagaggtttaattagttcatgattctgcaggctttacaggaatcaagatactggtagatctgctcagtttttggagaggcctcatgaagccatgaagtcatggcagaaggcaaagcagtgcaggcacatcacatggccagagcaagagcaagcgagagagagaaagagagaggtgccacacacttctaaacagtcagatcttacaagaagtcacttactattgcgaggacagcaccagaaggatggtgctaaattgttcgtaagaaatctgtccccatgatccattcatctgccaccagtccccacctccaatactggagattacaattcaacatgagatttgggtggggacacatattcaaactatatcatactgaccctggaccctcccaaatctcatgtccttctcacatttcaaaatacaatcatccctccacaatagtcccctcaagccttaactcattccagcatcaactcaaagtccaaagtcttatctgacacaaggcaggtcccttccacctatgagcctgtaaaataaagaacaagttatttactttcaagatacaatggggttataggcattgggtcaacattcccattcccaaagggagaaatcggccaaaagaaaggggctacaagccccacagaagttcagaacccagcagggctgaaaactccaaataaactccattgactccatatcccatatccagagcacactgatgcaaggggtggagctcttgggagggatggaacaccctgtggctttgcagggtttagcccctgcagctgctctcaggggctgttgtcgagtgcctgtggtttttcctggtgcagagtacaggctgttggtggatatattattcatggaggatggtggccctcccctcgtagcttcacgaggcagtgccccagtggagactctgtgtggggacttcaaccccacatttcccctctgcagtgccctagtagaggttctctgtgagggctccaatcctgcagcatgcttctgtctggacaccctggttttttaatatatactccgaaatctaggcagaggctcccaagcctcaactcttaacactctgtacacccacaggctaacaccacatggaagcggccaaggtttatggctgtcacaagctgaagcagcagcccaagctgcacctgaactcctttgagccacggctggagctggagtcatagggatgcagggagcagtgtctcgaggctgcacagggcagtggaccctggggctggcccatgagaccattcttccctcctaggcctctgggcctgtgatgggaggggctgccatgaaggtgtctgaaatgccttaaaggcctttttcccattgttttggcaatcagcctttgcctcctttttagttatgcaaatttctctagcaagtggttgcccagcagccctctttaattctctcccaaaaaagcttttactttctctgtcacatggccaagctacaaattttccaaccttttatgctctgcttcccttttactttttttttattttaaagagatggggtctcactatgttgtccaggctagtttgaactcttggactcaagcaatcctctcactcatcctcccaaagtgttgggattataggtgtgagccactgcgcccagcctctgcttctcttttaaatataagtttcaacttcaagtcatttctttgcttctgcatctgactgtaggctattggaagcagccaggccatatcgtgaacactttgctgcttagaaatttcttccaccagatatcctaggtcatcactctcaagttcaaacttccacatattcctagggcatggacataatgtggccaagttctttgctgaagcttaacaagggtgacctttactccagttcccaataagttcttcattttcatccgagaccttggcagcctggatttcattgtccatatcattatcagcattttggtcacaagcatttaaccagtctctaagaagttccaaactttccttcatcttcctgtcttcttctgagccctccaaactcttcttatctctgcctgttacccagttatctttacagcaattccccattccttgataccaattttctctattaggctgtttttgcattgctataaagaaatacctgagactgagtaatttataaagaaaagaggtttcattggcacatggattctgcaggctatacaggcatttgcttctggagaggcctcaggaagcttccaatcatggtggaaggtaaagggggagcaggcatatcacatggccagagcaggagcaagtgagagagagagagagagagagagagagagagagagaggtgccatacagttttaaacaggcagatcttgcaagaagtcactcacttttgcaaggatagcaccaaggggatggtgctaaaccatttgtgagaaattcacccccatgatccagtcacctcccaccaggccccacctccaatactggggattacacttcaacatgagatttgggtggggacacatatccaaactatatcattgcgtgtgtgtgtgtgtgtgtataatttttaaaccagatatatgtttctgcatatctctttcctttctttcattctttctttctttttttttttttttttttttgagacagagtctcactctgtcacccaggctgcagtgcagtggtgtgatctcggctcactgcaactcattgcaacctcctcctccctgattcaagcaattcccctgcctcagcctcctgagtagctgggattacaggcacatgccaccatgcctggctaatttttttgtattattagtagagatagggttttaccatgttggccagactggtctcaaacttctgacctcaggcaatccacccacctcggcctcccaaagtgctgggattataggcataagccaccatgcctggcctatatatctattttctaagatagaatctttgcatagtgatattcatctgtgagatctaaacattctacaaaaaaattaagaaaatatttttggatgtgttctttgggcatgcctctgcaacctgatgatttcctgctgcctgccagcaccaatacatttaatttcttttctgcagactcagaagtcaaaaacctcctttcagatgataactcagaaggccttactttattggatttgttgagcttcacctatcaagttgcccgaggaatggagtttttggcttcaaaaaatgtaagttcaaggaacacagacctttttagacccagatttcagtgagtggagtgtggaaggagatgctaggagatagatgttggaaaggccattaataacaggggcctcttacttacctgtctctctccttcatcccctacgcaggtcagggagtctgaaatcatcaggcatctactcttctctagagctttctctctgttgggagtgggtggagtgagaacctgggagaaggccagccctttatatccaggcagacagctccaagtgccaccatggatcagccagtcttgcaggggtgatgctatatcagctacagatggcttgatcctgagtcatttcttccttttccatgcagtgtgtccaccgtgatctggctgctcgcaacgtcctcctggcacaaggaaaaattgtgaagatctgtgactttggcctggccagagacatcatgcatgattcgaactatgtgtcgaaaggcagtgtacgtcctcacttccctcactggtcaggctcatcctccttcactttaatctctaaagtcaggtgttgcttctagagattcggtgcctgttttttaaaacatcaatagatttcaaggggtcagtacactgccttggcagcagattgcccaggtgtgagtgccagctccaccacttacttaatttggatttggggctagatacttgactgttctgcccctctgtctccctgattgtagtgggaggtgataatagtacctatttgctgagttgctatggggattaaatcaatgaattcatgtaaagtgcttaggacagtgcctggcatatagaaacagcactcaataatgttagctattttatttatttatttatttatttatttatttatttatttattttctttttttttgagacagagtctcactctgtcacccaggctggagtgcagtggcgcaatcttggctcactgcaaacttctgcctcccaggttgaagcaattctcctgccttagcctcccgagtaggtgggattacaggcatgcaccaccatgttcagctaatttttgtatttttagtagagacagggtttcaccatgttgcccagactggtctcgaactcctggcctcaagtgatctacctgcctcagcctcccaaagtgctgggatgacaggtgtgagccactgcatctggcaagtgttagctattaatatgtcaattgcgtgtatgcatggacaagcatgcattcccaaggatggtgtctttatattttaagcttttatcagattttcaaaagccatctgtgacccctaaaatagattggaaccatttgggtttatgtatcttggaggcacagtttccttaaagatactcattttgttgtctacttgaaccattcttcccatcccttccacttctcagcagatgacatagctccctgtggggatatatctgctccctgtaggtacaattccaaatcacctcactgcactggatgtgagacagcttatggcagctgctgcttccacctagagaaagacatgggcctgcatccatgctgtgtgtgattcatgtactcatgtggccgtgatagctgtaatcggctcatagatcattggatctgttcttagttttgttcccaggaatatctaaaaataggaaactggtccattcagggcttacaccttttgggtgaaaattcaggattaatgtttttggatattattcctttggaggacataaaaggcaatattgaccattcatcattcatctagtatttattgagcacctactatgtgccagggactgagagttcagtaatgaacaaaacacatgtaaaagacactcaaatgggacaagataattagcacaagttattaagagcccaaggggaacccttttctatttccactgctgtggatcatcagtgagtagacatgggtttaactgtctccctccttccttgcagacctttctgcccgtgaagtggatggctcctgagagcatctttgacaacctctacaccacactgagtgatgtctggtcttatggcattctgctctgggagatcttttcccttggtatgggcctgacattgctgcttatttgggctgttctgaaacaccactggaaggaaaatgtgttctttcaagccccaggatgtagacagtgttaagataacctggtgtgaggccagtatgctgcagccgcctcaaaccacatgttgtgccttattgtgtctgagataggcccatgcaggtggagatgggggtttttgttgggggttgcgtctcactcctggcctctgcccctcctctcctttgggctatgccagagtgacttcctcccactggaagtggtcccaatgacattcgcatcccagctgctttttcattttgggctttgggtcacatgggttcacccatggagagtgggccctccctcacctggtggcgattgatgctcaggtgaaaaggggtacgtggcgggaagggcagggctctcattcctggttgtcattggccagtcttgacaacccaggtgctgaacaacccaggtgccctgggctatccggtgaggtccctaagagaaggatgagccataaccctgacatctggatggttcatctggggagatgagacttacacacttagggataaacagtgtgctgctgatttaaaattgtaatttgagtcttgagtaaagagaaaggagtcctggaatagtgtgggaaggcttcagagagggaacttaacttgacctggccttggctttgaaagtgtgaaatgtttcatgaatttatctgtgatcaggatgtaatagtaaagtgtgtcttcctgccccgtctcctttttcatcctagttctccctccatggatgatcacaatggatcatccccgagtggcttaatggagtcctgtactcccttaaaagcagagaggccacaactttgatttttgctttagctatttgaacatacctggtgaaaaagactctctgggttttaatgattcagaatttctccttgcttttctagttcattttgtctgtgttgatccagtagtcatacacattgaaaaacacttgaacgcttatttctaaagatgtagaatttttgtgatggtacttggacttgaccaacctggagtcctaattaaacttaaggtttgagctggtctctgaagtcaaggagatgatgacactgaattttcttgaaaaaaccagtgcttcaaggctataggatctgaaaggttttctaacagtgttctatcatgccaagtgtttcagcaatgcactgagcgtttgttagtcctggtgttttattgtttggcttttaggtggcaccccttaccccggcatgatggtggattctactttctacaataagatcaagagtgggtaccggatggccaagcctgaccacgctaccagtgaagtgtgagctccttccccatcccgggggcctgtgttcacagtctgtgggtctagggggagggaggggccctgagacttccccctgtgcccactcttgagttctgtccccacagctacgagatcatggtgaaatgctggaacagtgagccggagaagagaccctccttttaccacctgagtgagattgtggagaatctgctgcctggacaatataaaaaggtgtgtttggatctgtgggtggaaaggtctggataaagctggaagttataccagtgagctgtgctgttccgcagttctagaggagcattttcaaaagaggcaaaagactgtgtgatccagtggctgggcttcatggcggtgctccacgagaccctagtagcaatgatgaatgaaaaccctccccttcccgtggggctttcctttcatcttatatgtgcagtacctgtaagcactattctccagatgtttgagtatcagaagttagtgtgcagttagaagactcagggcatccatggccattacatcactaatttgagtgcacttaaatccatgcgaaattggcttttaccagcggactggaaggaacaacctcagctgttatctgtggcaccagctggttttttgtggaataggaagcattgttcaaaggaacaaatgtaatttcttggaaccaggcaggatatgtaaatgaatgaaacaactttctgctgaggtgttgagaggaaaactcagacataacctcagtttcttagattgagattagtccctgtgtagactttttatacttatcatttttcttccttcttctcaaggaggaatagtgttaggagattgtgtgccgaactggaagttaaatgcttctgtctgttaattatctcactgcccactacaactttcacaggtgaggcagtgaggaggcagaaggaaattaaccctcagttggtcaaagatgctctgactggtggaaatgtgttggtgggaagagattgaagttattgttgaaaatagggtcttttcacatccaatgtgagacctctccaatgtttaaggatcatgaaggctttgggtattatccacccaatagaaggcctcactgcctctctatgggacccatccaagccctggaaaggcaacgtgatggggaccagaaggattctcagttgtagctactgacttggagaaggggctactggtatcttagcacctaatggcagaagctctttaccattggtggccccttcttcatgttctatgtctctggggatagttgacatgactctccttcaactaagtcccacatcttccaggtagtttggaaatatgtacagttaaataatggtaagttctgagtgtctctattcatttttgaggtttggttgttaacacttgattaaatatgttcaatgaatgtttatagagttatgaaaaaattcacctggacttcctgaagagtgaccatcctgctgtggcacgcatgcgtgtggactcagacaatgcatacattggtgtcacctacaaaaacgaggaagacaagctgaaggactgggagggtggtctggatgagcagagactgagcgctgacagtggctacatcattcctctgcctgacattgaccctgtccctgaggaggaggacctgggcaagaggaacagacacaggtagctgtgggggcagcctcggtgtctcacctttcccctcccctataggccctgaaggagaggacccattttcccgataatggtgcactcccggttggtaaatatgtactcagggacaagttgcagaatcctcaggaggtccacgtggttttgaaaatgcttcccagatgattctaatatgttccccctggggctgggagagggatgtgcatgttgtggggagagggacatgcttccctggtggagaatctttgagctaaattctcaggtaatttgatcaaattgatacagaactgtgattactgagatcatataagcctctcctgccattgtcttaaatagtcattgaactggggaaaaagtgaagagaggcgggactgggtcctttgacgctataccctacctgtgaatttgaatcacctgcagagatttaaaaactgctgatctacaagcctcacccaaaacaacaaattagaatccctgggggtggtggccaactgctccctggctgatttgtttcttctttcttttaaattttgtattatggaagatttctaacgtgtgcacaattcacatagtatagtgagctgttcagtattcgtcacccagcttcaatgactatgccctctgccagcctggatgcacacatggccatgtctgtctctcctcagcctcctctggattgtttggaagcaaatcctagacaccttatcatttcacccataaatattccagtgtgtgtctcttaaagataagggctctattttaaagaagaacaacagttattaaaaataactacaatgccgttatctcacccaaaacagggacaataaatcgttaaggcatcaggcagccagttaaagttcaaattatctcacaaatattatcatactccattaaaaagtgggcagaggacataagcagacacttttcaaaagaagacatacctgcagccaacaagcatatgaaaaaaatgctcaacatcactgatcactagagaaatgcaaatcagaaccgtgatgagataccatctcacaccagacagaatggttattattaaaaagtcaaaaaataacagatgctggtgaggttgtggagaaaaggggaagcgtatacactgcttgttgaagtgcaaattagttcagctattgtggaaagcagtgtggtgatttctcaaagaacttttaacagaattaccattggatccagcaatcccattactgggtatataaccaaaggaatataaatcattctaccataaagacatgcatacgtatgttcactgcagcactattcaacgatagcaaagacatggaatcatcctaaatgcccattgacagtagactggataaagaacatctggcacatatacaccatggaatactatgtgttgataaaaaagaacaagatctgagataccatctcccaccagtcagaatggctattatttaaaagtcaaaaagcaacagattgtggcgaggttgtggagaaaaagaaacacttttacaatgttggttggagtgtaaattagttcaaccattgtggaagacagtgtggcgattccccaaagacctagaggcagaaatactgtttgacccatcaatcccattactgagtatatacccagagtgatgtaaatcattctattataaaggcacatgaatgtgtatgttcactgctgcactgttcacaatagcaaaatcatggaatcaacctaaatgcccatcaatgatagactggataaagaaaatgtgatacatatacaccatggaatacgatgcagccgtaaaaaggaatgagatcatgtcctttgcagggacatggatggagctggaagccgttaccgtcagcaaactaacacaggaacagaaaaccaaacaccacatgttctcacttataagtgggagctgaacgatgaggacacatggacacatggagggaaacaacacacactggagcctttcaggggttggggattgggtggaacatcaggaagaatagctaatggatactgggcataatacctgggtgatgggatgatctgtgcggcaaaccaccatgacgcatgtttacccatgtaacaaacctgcacatcctgcatatgtacccctgaacttaaaaagtggaaaatacaaaaatgaaattaaaaaaagaacaagatcatgtcctttgcagcaacgtggatggagccggaggtcactatccttagcaaactaatacgggaacagaagaccagataccgcatgttctcacttataagtgggagctaaaacaacgagaacacatggacacaaagaggggaacaacagacaccagggcatagttgagggtgcagggtgggagaaggaagaggatcagaaaaaatacctatcggatactgtgcttattatttgggtgatgaaataatctgtacatcaaaccgccatgacatgtgatttatccatgtaacctgcacacgtgcccttgaacataaaataaaagttaaaaaaaaattatcatacacttgttttgttctgtctgagatccagataagagtcacacattgcacttggttgctatgtctctgtaagttcactatgcctctattttttgccctcttacatattatttgtgaagaaaccatagtgtttgcctgtggagttcccacaatcggcattttgctgattacatccttgaagtgtccttctcaggtgcttctgtcttctctatgtgttgtaaactggtagttagtctaggaacttaacctgactcaggttagatctttggcaaacatgcttcatagatggttctgtgtgcttctgtcaagaggtatgcactgtccagttgtctgccttttgtaacattatcagtcattgggtgatcattacctagaatttcttttttttttttttttttttgagatggagtctcgctctgtcacccaggctggagtgcagtggtgtgatctcagcttactgtaacctccacctcctgagttcaagccattctcatacctccgcctcctgagtagctgggattacaggcacatgccaccatgcccagctaatttttgtatttttagtagaaatggggtttcagcatgttggccaggctggttttgaactcctgacctcaagtgatctgccggtctcggcctcccaaggtgctgggattataggcatgaaccacctcacctggcctagattctttaactcagcaccaaggtggagctaatgcccaggcaggactgagaatcactggttgacgtggtcagatggaggagaccatgccccagttctccgctgtctttgcatggcccttggacagaggtaggagaaggtgatgatagtggcccctagttcaaggtccaagttgcttgtgtgtgtgtgtgtgtgtgtgtgtgtgtgtgtgtgtgtgttttcctcttctttcccatcagaacattattttggaggcttatgactgtgacctttgttaaccaatttaggtataatatgtagacagcccttgtttatttgtatggactgggtaattttgaaagtatggcttttctattttgttttagaatatgttatgtgatttgaagatgggacacagtggcccatcagtcttcggttttttattatgctttgctcaggccagtttttataacgtgtttatatctcttgagcatacggtgttcctccaagttttgggggtctgcgatggaacttcacgggggtcggggaaggctgggcagtgaatctagggctctctgtctcagatcctttctcaatttggttactttgtgtttgtgggctctgaataatatttgagttgtaagagggttctgcttttatataaagttagaaagtcacattggaataaataacatgagaaaggtgcccagaagttttctagggctacaacaggctgagctgcagaatttgacacgccaggaattgaactttctcagttgaagttcacgttcaagttaagtaacttgtgtggcatcacacagctagtaagtggggggaccattccagacctaaggctttctgactccagaactcccctttcagccacttctctagtacgtaaggagccgtcacctgggccctcaagttgggggttggtgggggggcatttgatgtcaagagagaggggaagagggcattccaggcaagtggcaggagatcctgagaacacagtttggatgctcaggaggcttccgggagagcacctgatgggcctggctgcagcttgcaccctgatgggcctgacttcaccccctgctctgccttcccaggcctttggatcaggcattgcttatgttctcttccactaggattgagtagggaaagtagaaattcttgcagcttgtcagtaactttgatgaaagacccagcagaaaagcaggaaagctgaagagtaaaaatgatgggtggaccttggttttccacgtggcctaccacagcatgtcaggcctgggggcagaatcttgccatactgtgcagcccaaatttgaatgccaaaggctttcgtttgtctctggggggccacagtctaggtctagttctgtgtaggagttgtaatatttgctcttctctccctcctccagctcgcagacctctgaagagagtgccattgagacgggttccagcagttccaccttcatcaagagagaggacgagaccattgaagacatcgacatgatggacgacatcggcatagactcttcagacctggtggaagacagcttcctgtaactggcggattcgaggggttccttccacttctggggccacctctggatcccgttcagaaaaccactttattgcaatgcggaggttgagaggaggacttggttgatgtttaaagagaagttcccagccaagggcctcggggagcgttctaaatatgaatgaatgggatattttgaaatgaactttgtcagtgttgcctcttgcaatgcctcagtagcatctcagtggtgtgtgaagtttggagatagatggataagggaataataggccacagaaggtgaactttgtgcttcaaggacattggtgagagtccaacagacacaatttatactgcgacagaacttcagcattgtaattatgtaaataactctaaccaaggctgtgtttagattgtattaactatcttctttggacttctgaagagaccactcaatccatccatgtacttccctcttgaaacctgatgtcagctgctgttgaactttttaaagaagtgcatgaaaaaccatttttgaaccttaaaaggtactggtactatagcattttgctatcttttttagtgttaaagagataaagaataataattaaccaaccttgtttaatagatttgggtcatttagaagcctgacaactcattttcatattgtaatctatgtttataatactactactgttatcagtaatgctaaatgtgtaataatgtaacatgatttccctccagagaaagcacaatttaaaacaatccttactaagtaggtgatgagtttgacagtttttgacatttatattaaataacatgtttctctataaagtatggtaatagctttagtgaatcaaatttagttgagcatagagaacaaagtaaaagtagtgttgtccaggaagtcagaatttttaactgtactgaataggttccccaatccatcgtattaaaaaacaattaactgccctctgaaataatgggattagaaacaaacaaaactcttaagtcctaaaagttctcaatgtagaggcataaacctgtgctgaacataacttctcatgtatattacccaatggaaaatataatgatcagcaaaaagactggatttgcagaagtttttttttttttcttcatgcctgatgaaagctttggcgaccccaatatatgtattttttgaatctatgaacctgaaaagggtcagaaggatgcccagacatcagcctccttctttcaccccttaccccaaagagaaagagtttgaaactcgagaccataaagatattctttagtggaggctggatgtgcattagcctggatcctcagttctcaaatgtgtgtggcagccaggatgactagatcctgggtttccatccttgagattctgaagtatgaagtctgagggaaaccagagtctgtatttttctaaactccctggctgttctgatcggccagttttcggaaacactgacttaggtttcaggaagttgccatgggaaacaaataatttgaactttggaacagggttggaattcaaccacgcaggaagcctactatttaaatccttggcttcaggttagtgacatttaatgccatctagctagcaattgcgaccttaatttaactttccagtcttagctgaggctgagaaagctaaagtttggttttgacaggttttccaaaagtaaagatgctacttcccactgtatgggggagattgaactttccccgtctcccgtcttctgcctcccactccataccccgccaaggaaaggcatgtacaaaaattatgcaattcagtgttccaagtctctgtgtaaccagctcagtgttttggtggaaaaaacattttaagttttactgataatttgaggttagatgggaggatgaattgtcacatctatccacactgtcaaacaggttggtgtgggttcattggcattctttgcaatactgcttaattgctgataccatatgaatgaaacatgggctgtgattactgcaatcactgtgctatcggcagatgatgctttggaagatgcagaagcaataataaagtacttgactacctactggtgtaatctcaatgcaagccccaactttcttatccaactttttcatagtaagtgcgaagactgagccagattggccaattaaaaacgaaaacctgactaggttctgtagagccaattagacttgaaatacgtttgtgtttctagaatcacagctcaagcattctgtttatcgctcactctcccttgtacagccttattttgttggtgctttgcattttgatattgctgtgagccttgcatgacatcatgaggccggatgaaacttctcagtccagcagtttccagtcctaacaaatgctcccacctgaatttgtatatgactgcatttgtgggtgtgtgtgtgttttcagcaaattccagatttgtttccttttggcctcctgcaaagtctccagaagaaaatttgccaatctttcctactttctatttttatgatgacaatcaaagccggcctgagaaacactatttgtgactttttaaacgattagtgatgtccttaaaatgtggtctgccaatctgtacaaaatggtcctatttttgtgaagagggacataagataaaatgatgttatacatcaatatgtatatatgtatttctatatagacttggagaatactgccaaaacatttatgacaagctgtatcactgccttcgtttatatttttttaactgtgataatccccacaggcacattaactgttgcacttttgaatgtccaaaatttatattttagaaataataaaaagaaagatacttacatgttcccaaaacaatggtgtggtgaatgtgtgagaaaaactaacttgatagggtctaccaatacaaaatgtattacgaatgcccctgttcatgtttttgttttaaaacgtgtaaatgaagatctttatatttcaataaatgatatataatttaaagttatactaaggtttcagcatttttgtttttagtttaatcataagaattaaagcaatcctgttctatttactttcttagcaacatttgtaggactctatattaggccttttttttttttttcctgagatggagttttgctcttgtcatccaggctggagtgcagtggcgtgatctcagttcactgcaacttctgcctcccgagttcaagcaattctcctgcctcagcctcccaagtagctgggattataggcgcctgccaccatgcctggctaatttttgtatttttagtagagatgggggtttcatcatgttggccgggctggtctcgaactcctgaccttagatgatctgcctgcctcggcctcccaaagtgctgggattacaggtgtgaaccaccacgcctggcctttattaggcttttgatgaaccaatagaatatctaaggtttaagacattatatgagctagattgttccacgacacagtatttgacttaaagatgattggcacttggctcatctttggtctcatcatttttttgattgttcatctttatcctgtggtgttttcttcccctgcataaggaatacaggactgcagtaactctgtacaacattcaactgtcgtaaaagtgtaggaagtaaaatgttaaattatttttttcaccgtgtcttcttccctgtccctgtcctgtttccaagaggcagagctgcaccacttggtgtgtcttttaaacttccagttccctttgtatgcatctgtgtatatatattcccatacacacatctctacgtttgcttcatatctacctaaatgggttctcactttatgtaatcctttgtaatgttcttttttctttcctttttaaaactatttattaaagcagttttagatttgcagtaaaattgagtagaaggtacagagatttcccctgtgtgccctgcccccacaccaacatagcatctccatcactaacattctccacctttgctacagctgatgaacctacattgccaaatcattacccataacacagtccacagttctgttttttttttaatgctgttttagcgatctctgtgaaaagtatacagaggtattagctccattggatcccattatgtaaatgtaccataatttatgcaatcatggtcttgtaaaatggatttacagtttccagttctttgctattaaaatgatttcatgaacatttttgcaacatacatatttgcatacaaaaatgtgttttgtagaatggatttctacaaatgaaattgctaggccaaagggtgtgcagaaataaattgatgttgagctgaagtcttcagataggattgatacataagttcttgagcatctgcacgtgaatcactggctttgcacattacatgcagttttctagtctctgctccacattgcccaggaatcatggtcttcaaaataggattggaagaaatacaatgtggtaagtgtgagagaatgtgggttttgtgttctgaagcatactgaagcaagtgactttaggaatttaaaaaaatggtacaactcaccttattttgagctcacggataatgaaaattgattatgttgttaataatcagaatatagcaccctattccaatataactccttatccaaattcaagtagcctgcagctggaagcatacttctttggagttaaacctccaaggagggattcagaagatcatggcatatgagaggcaagactagattgcagctcaggacagagcagcatgcagcagcttgcattgtgaattttagctccagatcctgagaggacccacagaccctctgatggaagtggacttctcctgcaggaccggggagacaccccaaatattgtgagttgccccaaatgcggaagtggtacagggagaccctcctctaccgaatgcgcagtcccactggagcagctgaagttttgcttgcgggagaagtttctgactttacctcaagctgagtcaagttagagagctgagcaaaatacaggggtggaggaagcagcagaaaggccctgggagctcgctgagtccccaagcagcccattcctgcctggcaccacagggatccatagggagggtggccagaggagcagggggtaaaactccacagggagaaggaaatctctagctgaactttgtaacaatttgaaaggggcaagaagcttcctggccggaactcgggggagggtgcaaatcgggcgtacagacttcacaggcagaggaagaactaaagcccttttctctcccagctgggaggaggatagccttgggcaagttttcaagcccatcttgccctctgcctggaaacagactcagggctgttgaggtgggcagggtgggagtgagacaagcccttcggtttgtgggggagctgggtgaggcttgtgactgccggctttcccctacttgcctgacaacctgcatgactcagcggagacagccataatcctcctaggtgcacaactccagtgacctgggaatctcactcccatttccccccagcagcctcagcaagacttgcccaaggagagtctgagctcagacatgcctagcctcacccgcacctgatggtcctttcctatccacgctggtagcataagacaaaggacataatcttgggaattctagggctccgccctccactggttcctctccacactactatagctgatgcttcctgggaagtaccaccttctggcaggaggccaaccagcacaaagataaagcattaaaccaccaagactaaggaccctcatggagtccattgcactgtccaccacctccaccagaacaagcactggtatacatggctgagagacccatagatggttcacgtcacaggactctgtgcagacaacccccagtaccagcccagagctgggtagactaattgggtggctagacccagaagagagaaaacaaccactgcagtttagctcataggaagccacatccataggaaaagggggagagtactacatcaaaggaacacccagtgggacaaaagaatctgaacaacagccttcagccctataccttccctctgacagagcctacccaaatgagaagaaaccagaaaaccaaccctggtaataggacaaaacaaggctcttcaacacctcccaaaatcacactagttcaccagcaatggatccaaaccaagaagaaatcctgatttacttgaaaaagaattcaagaagttagttattaagcttatcagggagggaccagaagaaggtgaagctcaatgcaaggaaatctaaaaaatgatataagaagtgaagagagaaatactcatggaaatagatagcttaaggaaaaaacaataaaaaattcaggaaactttggacacacttttagaaatgtgaaatgctctggaaagtctcagcaatagaattgaacaagtagaagaaagaactttagagctcaaagacaaggtcctcagattaacccaatccaacaaagacaaagaaagaagaataagatgcagccataaaaaaggatgagttcatgtcctttgcagagacatggatgaagctggaaaccatcattctaagcaaactattacaaggacagaaaaccaaacaccacatgttctcactcataggtgggagctgaacaacaagaacacatgaacacaggcgggggggaacatcacacatcagagcctgtcagggggtggggggccgggggagagatagcattaggagaaacacctaatgtaaatgacgagttgatgggtgcagcaaaccaacatggcacatgtatacctatgtaacaaacccgcacattgtgcacatgtaccccagaacttaaagcataataataaaaaaaagaaaaaagaataatatgaacaaagcctccaagaaatctggaattgtgttaaacaaccaaatataagaataattgttgttcctgaggaagaagacaattctaaaagcttagaaaacatacttgggggaataatggaggaaaacatccctggccttgtgagatactagacagccatatacaagaagcataaagaacacctgggaaattcactgcaaaaagatcttcacctaggcacattgtcatcagattatccaaagttaagaccaaggaaagaatcttaatagctgtgagacagaagcacaaaggaaaacctatcagattaatggcagatttctcagcagaaaccctacaagctagaagggattggggcactatcttcagcctcctcaaacaaaacattttatcggccaagaattttgtatccagcaaaactaagcatcatatatgaaggaaagatacagttgttttcagacaaataaatgctgagcgaattcaccattatcaaactaccactataagaactgctaaaaggaaccctaaattttgaaacaaatcctggaaacacattgaaacagaacgtctttaaagaataaatcacatagggcctgtaaaacaaaaatacaatttaaaaagcaaaaacaacaaacaaaaaaccaaaccacagaggcaacaaagagcatgatggaagcaacagtacatcacatttcaatactaacattgaatgtaaatggcctaaatgctctacttaaaagatacagaaccacagagtgggtaagaattcaccaactaactatctactgccttcaagagactcacctaacacataaggacttacacagaattaaagtaaaagaatggaaaggggcattttgtgcaaatggacaccaaaatcgagcaggggtaactattcttatatcagaaaaaaacaaacaaacactttaaagcaacagcagttaaaagagacaaagagggacattatataatggtaaaaggccttgtccaacaggaaaatatcacaatcttaaacatatatgcacctaacactggagatcacaaacttataaaacaattactaatagtcctaagaaatgagatagacagcaacgcaataatagtgggggacttcaatactccactgacagcactagacaggtcatcaagacggaaagtcaacaaagaagcaatggatttaaactatactttggaacaaatggacctaacagatatatacaaaacatttcatccaacaacctcagaatacacattttattcaacagcatatggaactttctccaagatagaccatatgataggccataaaataagcctcaataaatttaagaaaattgaaattatatcaagtactctctcagaccacagtgaaataaaactggaaatcaactctaaaaggaatcttcaaaaccattcaaatacatggaaattaaataacctgctcctgaacgagcattgggtcaaaaacaaaatcaagatggaagtttaaaaattctttgaactgaatgccaataacgacacaaccaatcaaaacctctgggatacaacaaaggcagtgctaagagtaaagttcatagccataaatgcctacatcaaaaagcttgaaaaagcacagacaacctaaagtcacatctcaaggaactagagaaacaagaacaaacaaaacctaaacccagtacaagaagaaaataaccaagagcagaactaaataaaattataaccaaaaaaaagataaatgaaacaaaaagctgatcctttgagaacataaataaaatagaccattagcaagattaaccaagaaaagaagagagaaaatccaaataacctcactaaaaaacaaaacaggagatattacaactgacaccactgaaatacaaaagatcatttaaggctactatgaacacctttatgtacataaactagaaaacctagaagagatggataaattcctggaaaaatacaatcctcgtggcctaaatcaggaagaattagatatgctgaacagaccaataacaagtagtgagattgaaatagtaattaagaaattataaaccaaaaaaagtccaggaccagatggattcacagcagaattctaccagacattcaaagaagatttggtatcaatccttttgacactattccacaagatagagaagaaggaaccctccttaattcattttatgacgccaacatcaccctaataccaaaaccagggaggacacaaccaaaacaacaacaacaaaaacaaacaaacaaacaaacagaaaaaacactacagaccgatannnnnnnnnnnnnnnnnnnnactacagaccgatatccttgatgaacatagatgctaaaatccttaacaaaatactagctaactgaatccaataacataaaaaagataatccaccatgattaagtgggtttcataccagggatgcagggatggtttaacatatgcaagtcaataaatgtgatacaccacataaacagaattaaaaacaaaaatcacatgaccctctcaatagatgcagaaaaagcatttgacaagatccagtattgctttatgattaaaactctcagcaaaattggcatacaagggacataccttaatgtaataaaagccacctatgacaaacccatatccaacataatactgaatgaggaaaagttgaaagcattccttctgagtactggaaaaagacaaggatgcccactctcaccacttcttttcaacatagtactagaagtcctatccagagcaataagacaagagaaaaaaataaagggcatccaaacaagtaaagaggaagtcaaactgtcaccgtttgctgatgatatgatcatttaccttgaaaaccctaagtaaggactcctccaaaaagctcctagaactgataaaagaattcagcaaagtttctggatacaagattaatgtacacaaatcagtagctcttctatacaccaacagcgaccaagtggagaatcacatcaagaactcaatcccttttataatagctgaaaaaaaaatacttaggaatatacctaacaaaggagtcaaaaaacttctacaaggaaaactacaaaacactgctgaaagaaatcatagatgacacaaacaaatagaaacacatcctatgcccatggatgggcagaatcaatattgtgaaaatgaccataccaccaaaagcaacctacaaattcaatgcaacccccatcagaataccaccatcattcttcacagaattagaaaaaacaattctaaaattcatgtggaatcaaaaaagagcctgcatagccaaagcaagactaaacaaaaaacaaatctggaggcatcacactacctgatttcaaactaccctgtaaggccgtagtcaccaaaacagcatggtactgttataaaaataggcacatagaccaatggaacagaatacagaacccagaaataaacccaaaaacttaaagccaactgatctttgacaaagtaaacaaaaatataaagtggggaaaggacacccttttcaataaatggtgctgggataattggctagccacatgtagaagaataaaactggatcctcatctctcaccttatacaaaaatcaactcaagacggattaaggacttaaacctaagacctgaaactataaaaattctagaagataacactggaaaatccctcctagatattggcttaggcaaggaattcatgaccaagaacccaaaagcaaatgcaataaaaacaaagataaatagctgggacctaattaaactaaagagcttttgcacagcaaaaggaatagtcagcagagtaaacagacaacccacagactgggagaaaatcttcacaatctatacatctgacaaaggactaatatccagaatctacaaccaactcaaacaaatcagtaagtaaaaaacaaataatcccatcaaaaagtgggctaagggcatgaagagacaattctcaaaagaagatacacaaatggccaataaacatgtgaaaaaatgctcaacatcactaacgatcagggaaatgcaaatcaaaaccacaatgcgataccagcttactcctgcaagaatggccataatgaaaaaatcagaaaatagtagatgttggtgtgaatgccatgaacaggggaccctttaaccctgctggcaggaatgttaactatttcaccccccatggaaaacagtgtggagacgcctttttttttttttttttttttttttttttttttttttttgagacagagtctcactctgtcacccaggctggagtatactggtgcaatcatggctcactgcaacctctgcctcctgggttcaagtgattttcctgcctcagcctcctgagtagctgggatcataggcacctgccaccactcccgagtaatttttgtatttttagtagagacgagtttcatcatgttgaccaggctggtctcgaactttctgacttcaggtgatccacccacctcgggctcccaaagtgctgtcattacaggtgtgatccactgtgcccagctgagattccttaaagaactaaaagtagaaccaccatctgatcctgcaatatcactactgggtatctactcaggggaaaagaagtaattattcgaaaaagatacttgcatacacatgtttatagcagcaaaattcacaattggaaaattgtggaaccaacccaaatgcccatcaatcaacgagtggaaaaagaaactgatatatatatatacatatgcatatatgagatatatatgtatgatggaatactacacagccatgaaaaggaatgaattagcagcatttgcagtgacctggatgagactggagactattattctaagtgacgtaactcaagaatgggaaaccaaacatcgtgtgttctcactgatctgtgggagctaagctatgaggacgcaaaggcataagaatgatacaatggactacgggacttgggaggaggcatgggagggggcgagggataaaagattacaagtatggtgcagtgtatacttcttgggaagtgggtgaaccaaaatctcacaaatcactactaaagaacctaatcatgtagccaataccaccagtacttcaaaacttatggaaaaataaaataaaaacctccaaggaactagctgtaggtgggatattggctgtatctcagttccagctccaggaagaagacagatcattgggaacaagaaccctgctgattaaacaatagctgcctaatacggcagcaacacagggtactccaaacttgcttggataattttgtccttttaaaatgtacaattctacttcttaatacaatgcagacaactccatctactttatctagtcataataaaatgaaaatgacttttactcttcgaatacttaaaacttgttcaaagattctttcacatttacttcttttgattcttacaaaagaagggaagacattttatagatgaggaaaccaagatagcacaagacaaatgacttttaaaaaattgtgtaactgaatactgacagcactaggattagaaactgcaaaaatactaatgccagtgtcatttatactacaacaaaccatgggaaaaggaagaggtacagaaaaatatctgcgctcagaagtaggttgcttgcttcttgagatatttcaaaagacaagtgatgagctagtcagcctgtggaactattctacacgtttgtaatcagaacaatttcttttcagggtataatacaccagttctaataatgggtattatgattttaatagctatgtgcttcacaaaatgcagttcaggaaaatggctaagaatatctgaatccatcataaactaggcaattttccctgggataacagtgatagaaatgtttcattatctctcgttctaaatacatgtaaggattaaatccaactacattgttatagcaaaattaatatactgtgtttataacagacacaatttttcaccccctcccattaagatatatgtgaaaatacatatgtggctttaattagcagattataacattctgttccacgcagttagatacatagcacctgtgtcttaaagaataatgaatatattctccaaaatctattcatctatgggtaatgtttccatcactcacactttcgtttacatataa

SEQ ID NO: 1262 - DNA, 6240 bp, Homo sapiens
atggggacttcccatccggcgttcctggtcttaggctgtcttctcacagggctgagcctaatcctctgccagctttcattaccctctatccttccaaatgaaaatgaaaaggttgtgcagctgaattcatccttttctctgagatgctttggggagagtgaagtgagctggcagtaccccatgtctgaagaagagagctccgatgtggaaatcagaaatgaagaaaacaacagcggcctttttgtgacggtcttggaagtgagcagtgcctcggcggcccacacagggttgtacacttgctattacaaccacactcagacagaagagaatgagcttgaaggcaggcacatttacatctatgtgccagacccagatgtagcctttgtacctctaggaatgacggattatttagtcatcgtggaggatgatgattctgccattataccttgtcgcacaactgatcccgagactcctgtaaccttacacaacagtgagggggtggtacctgcctcctacgacagcagacagggctttaatgggaccttcactgtagggccctatatctgtgaggccaccgtcaaaggaaagaagttccagaccatcccatttaatgtttatgctttaaaagcaacatcagagctggatctagaaatggaagctcttaaaaccgtgtataagtcaggggaaacgattgtggtcacctgtgctgtttttaacaatgaggtggttgaccttcaatggacttaccctggagaagtgaaaggcaaaggcatcacaatgctggaagaaatcaaagtcccatccatcaaattggtgtacactttgacggtccccgaggccacggtgaaagacagtggagattacgaatgtgctgcccgccaggctaccagggaggtcaaagaaatgaagaaagtcactatttctgtccatgagaaaggtttcattgaaatcaaacccaccttcagccagttggaagctgtcaacctgcatgaagtcaaacattttgttgtagaggtgcgggcctacccacctcccaggatatcctggctgaaaaacaatctgactctgattgaaaatctcactgagatcaccactgatgtggaaaagattcaggaaataaggtatcgaagcaaattaaagctgatccgtgctaaggaagaagacagtggccattatactattgtagctcaaaatgaagatgctgtgaagagctatacttttgaactgttaactcaagttccttcatccattctggacttggtcgatgatcaccatggctcaactgggggacagacggtgaggtgcacagctgaaggcacgccgcttcctgatattgagtggatgatatgcaaagatattaagaaatgtaataatgaaacttcctggactattttggccaacaatgtctcaaacatcatcacggagatccactcccgagacaggagtaccgtggagggccgtgtgactttcgccaaagtggaggagaccatcgccgtgcgatgcctggctaagaatctccttggagctgagaaccgagagctgaagctggtggctcccaccctgcgttctgaactcacggtggctgctgcagtcctggtgctgttggtgattgtgatcatctcacttattgtcctggttgtcatttggaaacagaaaccgaggtatgaaattcgctggagggtcattgaatcaatcagcccggatggacatgaatatatttatgtggacccgatgcagctgccttatgactcaagatgggagtttccaagagatggactagtgcttggtcgggtcttggggtctggagcgtttgggaaggtggttgaaggaacagcctatggattaagccggtcccaacctgtcatgaaagttgcagtgaagatgctaaaacccacggccagatccagtgaaaaacaagctctcatgtctgaactgaagataatgactcacctggggccacatttgaacattgtaaacttgctgggagcctgcaccaagtcaggccccatttacatcatcacagagtattgcttctatggagatttggtcaactatttgcataagaatagggatagcttcctgagccaccacccagagaagccaaagaaagagctggatatctttggattgaaccctgctgatgaaagcacacggagctatgttattttatcttttgaaaacaatggtgactacatggacatgaagcaggctgatactacacagtatgtccccatgctagaaaggaaagaggtttctaaatattccgacatccagagatcactctatgatcgtccagcctcatataagaagaaatctatgttagactcagaagtcaaaaacctcctttcagatgataactcagaaggccttactttattggatttgttgagcttcacctatcaagttgcccgaggaatggagtttttggcttcaaaaaattgtgtccaccgtgatctggctgctcgcaacgtcctcctggcacaaggaaaaattgtgaagatctgtgactttggcctggccagagacatcatgcatgattcgaactatgtgtcgaaaggcagtacctttctgcccgtgaagtggatggctcctgagagcatctttgacaacctctacaccacactgagtgatgtctggtcttatggcattctgctctgggagatcttttcccttggtggcaccccttaccccggcatgatggtggattctactttctacaataagatcaagagtgggtaccggatggccaagcctgaccacgctaccagtgaagtctacgagatcatggtgaaatgctggaacagtgagccggagaagagaccctccttttaccacctgagtgagattgtggagaatctgctgcctggacaatataaaaagagttatgaaaaaattcacctggacttcctgaagagtgaccatcctgctgtggcacgcatgcgtgtggactcagacaatgcatacattggtgtcacctacaaaaacgaggaagacaagctgaaggactgggagggtggtctggatgagcagagactgagcgctgacagtggctacatcattcctctgcctgacattgaccctgtccctgaggaggaggacctgggcaagaggaacagacacagctcgcagacctctgaagagagtgccattgagacgggttccagcagttccaccttcatcaagagagaggacgagaccattgaagacatcgacatgatggacgacatcggcatagactcttcagacctggtggaagacagcttcctgtaactggcggattcgaggggttccttccacttctggggccacctctggatcccgttcagaaaaccactttattgcaatgcggaggttgagaggaggacttggttgatgtttaaagagaagttcccagccaagggcctcggggagcgttctaaatatgaatgaatgggatattttgaaatgaactttgtcagtgttgcctcttgcaatgcctcagtagcatctcagtggtgtgtgaagtttggagatagatggataagggaataataggccacagaaggtgaactttgtgcttcaaggacattggtgagagtccaacagacacaatttatactgcgacagaacttcagcattgtaattatgtaaataactctaaccaaggctgtgtttagattgtattaactatcttctttggacttctgaagagaccactcaatccatccatgtacttccctcttgaaacctgatgtcagctgctgttgaactttttaaagaagtgcatgaaaaaccatttttgaaccttaaaaggtactggtactatagcattttgctatcttttttagtgttaaagagataaagaataataattaaccaaccttgtttaatagatttgggtcatttagaagcctgacaactcattttcatattgtaatctatgtttataatactactactgttatcagtaatgctaaatgtgtaataatgtaacatgatttccctccagagaaagcacaatttaaaacaatccttactaagtaggtgatgagtttgacagtttttgacatttatattaaataacatgtttctctataaagtatggtaatagctttagtgaatcaaatttagttgagcatagagaacaaagtaaaagtagtgttgtccaggaagtcagaatttttaactgtactgaataggttccccaatccatcgtattaaaaaacaattaactgccctctgaaataatgggattagaaacaaacaaaactcttaagtcctaaaagttctcaatgtagaggcataaacctgtgctgaacataacttctcatgtatattacccaatggaaaatataatgatcagcaaaaagactggatttgcagaagtttttttttttttcttcatgcctgatgaaagctttggcgaccccaatatatgtattttttgaatctatgaacctgaaaagggtcagaaggatgcccagacatcagcctccttctttcaccccttaccccaaagagaaagagtttgaaactcgagaccataaagatattctttagtggaggctggatgtgcattagcctggatcctcagttctcaaatgtgtgtggcagccaggatgactagatcctgggtttccatccttgagattctgaagtatgaagtctgagggaaaccagagtctgtatttttctaaactccctggctgttctgatcggccagttttcggaaacactgacttaggtttcaggaagttgccatgggaaacaaataatttgaactttggaacagggttggaattcaaccacgcaggaagcctactatttaaatccttggcttcaggttagtgacatttaatgccatctagctagcaattgcgaccttaatttaactttccagtcttagctgaggctgagaaagctaaagtttggttttgacaggttttccaaaagtaaagatgctacttcccactgtatgggggagattgaactttccccgtctcccgtcttctgcctcccactccataccccgccaaggaaaggcatgtacaaaaattatgcaattcagtgttccaagtctctgtgtaaccagctcagtgttttggtggaaaaaacattttaagttttactgataatttgaggttagatgggaggatgaattgtcacatctatccacactgtcaaacaggttggtgtgggttcattggcattctttgcaatactgcttaattgctgataccatatgaatgaaacatgggctgtgattactgcaatcactgtgctatcggcagatgatgctttggaagatgcagaagcaataataaagtacttgactacctactggtgtaatctcaatgcaagccccaactttcttatccaactttttcatagtaagtgcgaagactgagccagattggccaattaaaaacgaaaacctgactaggttctgtagagccaattagacttgaaatacgtttgtgtttctagaatcacagctcaagcattctgtttatcgctcactctcccttgtacagccttattttgttggtgctttgcattttgatattgctgtgagccttgcatgacatcatgaggccggatgaaacttctcagtccagcagtttccagtcctaacaaatgctcccacctgaatttgtatatgactgcatttgtgggtgtgtgtgtgttttcagcaaattccagatttgtttccttttggcctcctgcaaagtctccagaagaaaatttgccaatctttcctactttctatttttatgatgacaatcaaagccggcctgagaaacactatttgtgactttttaaacgattagtgatgtccttaaaatgtggtctgccaatctgtacaaaatggtcctatttttgtgaagagggacataagataaaatgatgttatacatcaatatgtatatatgtatttctatatagacttggagaatactgccaaaacatttatgacaagctgtatcactgccttcgtttatatttttttaactgtgataatccccacaggcacattaactgttgcacttttgaatgtccaaaatttatattttagaaataataaaaagaaagatacttacatgttcccaaaacaatggtgtggtgaatgtgtgagaaaaactaacttgatagggtctaccaatacaaaatgtattacgaatgcccctgttcatgtttttgttttaaaacgtgtaaatgaagatctttatatttcaataaatgatatataatttaaagtta

SEQ ID NO: 1263 - protein, 1089 aa, Homo sapiens
MGTSHPAFLVLGCLLTGLSLILCQLSLPSILPNENEKVVQLNSSFSLRCFGESEVSWQYPMSEEESSDVEIRNEENNSGLFVTVLEVSSASAAHTGLYTCYYNHTQTEENELEGRHIYIYVPDPDVAFVPLGMTDYLVIVEDDDSAIIPCRTTDPETPVTLHNSEGVVPASYDSRQGFNGTFTVGPYICEATVKGKKFQTIPFNVYALKATSELDLEMEALKTVYKSGETIVVTCAVFNNEVVDLQWTYPGEVKGKGITMLEEIKVPSIKLVYTLTVPEATVKDSGDYECAARQATREVKEMKKVTISVHEKGFIEIKPTFSQLEAVNLHEVKHFVVEVRAYPPPRISWLKNNLTLIENLTEITTDVEKIQEIRYRSKLKLIRAKEEDSGHYTIVAQNEDAVKSYTFELLTQVPSSILDLVDDHHGSTGGQTVRCTAEGTPLPDIEWMICKDIKKCNNETSWTILANNVSNIITEIHSRDRSTVEGRVTFAKVEETIAVRCLAKNLLGAENRELKLVAPTLRSELTVAAAVLVLLVIVIISLIVLVVIWKQKPRYEIRWRVIESISPDGHEYIYVDPMQLPYDSRWEFPRDGLVLGRVLGSGAFGKVVEGTAYGLSRSQPVMKVAVKMLKPTARSSEKQALMSELKIMTHLGPHLNIVNLLGACTKSGPIYIITEYCFYGDLVNYLHKNRDSFLSHHPEKPKKELDIFGLNPADESTRSYVILSFENNGDYMDMKQADTTQYVPMLERKEVSKYSDIQRSLYDRPASYKKKSMLDSEVKNLLSDDNSEGLTLLDLLSFTYQVARGMEFLASKNCVHRDLAARNVLLAQGKIVKICDFGLARDIMHDSNYVSKGSTFLPVKWMAPESIFDNLYTTLSDVWSYGILLWEIFSLGGTPYPGMMVDSTFYNKIKSGYRMAKPDHATSEVYEIMVKCWNSEPEKRPSFYHLSEIVENLLPGQYKKSYEKIHLDFLKSDHPAVARMRVDSDNAYIGVTYKNEEDKLKDWEGGLDEQRLSADSGYIIPLPDIDPVPEEEDLGKRNRHSSQTSEESAIETGSSSSTFIKREDETIEDIDMMDDIGIDSSDLVEDSFL

SEQ ID NO: 1264 - DNA, 906 bp, Homo sapiens
tgctgactggcttcctgcaagctaccttccctccctgggcctcagtttctctctctgctgagccagaagatgtctaaagacccctttggttccaccctgagagcctgtctccctaacctcaacttcttccccagttcagagaacccaggcatccagctgccccaccccagctctgggtaacggagacggccgaccccggggcacaggcccagcaaggactggggtttcagaagctgccagaggaggagccagaaacagatctcagccccgggctcccagctgcccacctcataggcgctccgctgaaggggcaggggctaggctgggagacgacgaaggaacaggcgtttctgacgagcgggacgcagttctcggacgccgaggggctggcgctcccgcaggacggcctctattacctctactgtctcgtcggctaccggggccgggcgccccctggcggcggggacccccagggccgctcggtcacgctgcgcagctctctgtaccgggcggggggcgcctacgggccgggcactcccgagctgctgctcgagggcgccgagacggtgactccagtgctggacccggccaggagacaagggtacgggcctctctggtacacgagcgtggggttcggcggcctggtgcagctccggaggggcgagagggtgtacgtcaacatcagtcaccccgatatggtggacttcgcgagagggaagaccttctttggggccgtgatggtggggtgagggaatatgagtgcgtggtgcgagtgcgtgaatattgggggcccggacgcccaggaccccatggcagtgggaaaaatgtaggagactgtttggaaattgattttgaacctgatgaaaataaagaatggaaagcttcagtgctgccgataaagatgct

SEQ ID NO: 1265 - protein, 210 aa, Homo sapiens
PQLLPQFREPRHPAAPPQLWVTETADPGAQAQQGLGFQKLPEEEPETDLSPGLPAAHLIGAPLKGQGLGWETTKEQAFLTSGTQFSDAEGLALPQDGLYYLYCLVGYRGRAPPGGGDPQGRSVTLRSSLYRAGGAYGPGTPELLLEGAETVTPVLDPARRQGYGPLWYTSVGFGGLVQLRRGERVYVNISHPDMVDFARGKTFFGAVMVG

SEQ ID NO: 1266 - DNA, 854 bp, Homo sapiens
cagtctcaatgggggcactggggctggagggcaggggtgggaggctccaggggaggggttccctcctgctagctgtggcaggagccacttctctggtgaccttgttgctggcggtgcctatcactgtcctggctgtgctggccttagtgccccaggatcagggaggactgggtttcagaagctgccagaggaggagccagaaacagatctcagccccgggctcccagctgcccacctcataggcgctccgctgaaggggcaggggctaggctgggagacgacgaaggaacaggcgtttctgacgagcgggacgcagttctcggacgccgaggggctggcgctcccgcaggacggcctctattacctctactgtctcgtcggctaccggggccgggcgccccctggcggcggggacccccagggccgctcggtcacgctgcgcagctctctgtaccgggcggggggcgcctacgggccgggcactcccgagctgctgctcgagggcgccgagacggtgactccagtgctggacccggccaggagacaagggtacgggcctctctggtacacgagcgtggggttcggcggcctggtgcagctccggaggggcgagagggtgtacgtcaacatcagtcaccccgatatggtggacttcgcgagagggaagaccttctttggggccgtgatggtggggtgagggaatatgagtgcgtggtgcgagtgcgtgaatattgggggcccggacgcccaggaccccatggcagtgggaaaaatgtaggagactgtttggaaattgattttgaacctgatgaaaataaagaatggaaagcttcagtgctgccgataaagatgct

SEQ ID NO: 1267 - protein, 77 aa, Homo sapiens
MGALGLEGRGGRLQGRGSLLLAVAGATSLVTLLLAVPITVLAVLALVPQDQGGLGFRSCQRRSQKQISAPGSQLPTS

SEQ ID NO: 1268 - DNA, 1543 bp, Homo sapiens
atgacaattctaggtacaacttttggcatggttttttctttacttcaagtcgtttctggagaaagtggctatgctcaaaatggagacttggaagatgcagaactggatgactactcattctcatgctatagccagttggaagtgaatggatcgcagcactcactgacctgtgcttttgaggacccagatgtcaacatcaccaatctggaatttgaaatatgtggggccctcgtggaggtaaagtgcctgaatttcaggaaactacaagagatatatttcatcgagacaaagaaattcttactgattggaaagagcaatatatgtgtgaaggttggagaaaagagtctaacctgcaaaaaaatagacctaaccactatagttaaacctgaggctccttttgacctgagtgtcgtctatcgggaaggagccaatgactttgtggtgacatttaatacatcacacttgcaaaagaagtatgtaaaagttttaatgcacgatgtagcttaccgccaggaaaaggatgaaaacaaatggacgcatgtgaatttatccagcacaaagctgacactcctgcagagaaagctccaaccggcagcaatgtatgagattaaagttcgatccatccctgatcactattttaaaggcttctggagtgaatggagtccaagttattacttcagaactccagagatcaataatagctcaggattaagcctatcgtatggcccagtctccccgatcataagaagactctggaacatctttgtaagaaaccaagaaaagaatttaaatgtgagtttcaatcctgaaagtttcctggactgccagattcatagggtggatgacattcaagctagagatgaagtggaaggttttctgcaagatacgtttcctcagcaactagaagaatctgagaagcagaggcttggaggggatgtgcagagccccaactgcccatctgaggatgtagtcatcactccagaaagctttggaagagattcatccctcacatgcctggctgggaatgtcagtgcatgtgacgcccctattctctcctcttccaggtccctagactgcagggagagtggcaagaatgggcctcatgtgtaccaggacctcctgcttagccttgggactacaaacagcacgctgccccctccattttctctccaatctggaatcctgacattgaacccagttgctcagggtcagcccattcttacttccctgggatcaaatcaagaagaagcatatgtcaccatgtccagcttctaccaaaaccagtgaagtgtaagaaacccagactgaacttaccgtgagcgacaaagatgatttaaaagggaagtctagagttcctagtctccctcacagcacagagaagacaaaattagcaaaaccccactacacagtctgcaagattctgaaacattgctttgaccactcttcctgagttcagtggcactcaacatgagtcaagagcatcctgcttctaccatgtggatttggtcacaaggtttaaggtgacccaatgattcagctattt

SEQ ID NO: 1269 - protein, 428 aa, Homo sapiens
MTILGTTFGMVFSLLQVVSGESGYAQNGDLEDAELDDYSFSCYSQLEVNGSQHSLTCAFEDPDVNITNLEFEICGALVEVKCLNFRKLQEIYFIETKKFLLIGKSNICVKVGEKSLTCKKIDLTTIVKPEAPFDLSVVYREGANDFVVTFNTSHLQKKYVKVLMHDVAYRQEKDENKWTHVNLSSTKLTLLQRKLQPAAMYEIKVRSIPDHYFKGFWSEWSPSYYFRTPEINNSSGLSLSYGPVSPIIRRLWNIFVRNQEKNLNVSFNPESFLDCQIHRVDDIQARDEVEGFLQDTFPQQLEESEKQRLGGDVQSPNCPSEDVVITPESFGRDSSLTCLAGNVSACDAPILSSSRSLDCRESGKNGPHVYQDLLLSLGTTNSTLPPPFSLQSGILTLNPVAQGQPILTSLGSNQEEAYVTMSSFYQNQ

SEQ ID NO: 1270 - DNA, 7348 bp, Homo sapiens
gatgcgtggactgagcccagaccgcaggctgcccgagcccgccccctgcccggctgcggggagccctgagcccaggtccgcgggccgccgccaacgccacgtcctggccctgccggaagaagaggcatggcggccccagcagtgcgctctgctcgaggccgacgcctcggacgaggtgggcatgctgccggcttccccgcgcgccgcctctggcttcgacaacttcttccaggtgcaggagggcgagggccagggctgggagggcgccatggcactggaggcgggctccagccctttcctgccggtgagccccgaggtcatgaagcggcggcgcgggggcctcatcgagcagcgcgacatcatcaaggcccacgaggcgcacaagatgcagagcaccccgcaggcccggcgcaaggaatgggagatggctcgcttcggggaggcggtggtcgccaggccagggtccggcgatggagactcggaccagagcaggaaccggcaaggaacccccgtgccggcctcggggcaggcggccgcctacaagcagacgaaagcacagagggcgcggactatggctttgtacaaccccattcccgtccggcagaactgtttcaccgtcaacagatccctgttcatcttcggagaagataacattgtcaggaaatatgccaagaagctcatcgattggccgccatttgagtacatgatcctggccaccatcattgccaactgcatcgtcctggccctggagcagcatcttcctgaggatgacaagacccccatgtcccgaagactggagaagacagaaccttatttcattgggatcttttgctttgaagctgggatcaaaattgtggccctggggttcatcttccataagggctcttacctccgcaatggctggaatgtcatggacttcatcgtggtcctcagtggcatcctggccactgcaggaacccacttcaatactcacgtggacctgaggaccctccgggctgtgcgtgtcctgcggcctttgaagctcgtgtcagggatacctagcctgcagattgtgttgaagtccatcatgaaggccatggtacctcttctgcagattggccttctgctcttctttgccatcctgatgtttgctatcattggtttggagttctacagtggcaagttacatcgagcatgcttcatgaacaattcaggtattctagaaggatttgacccccctcacccatgtggtgtgcagggctgcccagctggttatgaatgcaaggactggatcggccccaatgatgggatcacccagtttgataacatcctttttgctgtgctgactgtcttccagtgcatcaccatggaagggtggaccactgtgctgtacaataccaatgatgccttaggagccacctggaattggctgtacttcatccccctcatcatcattggatccttctttgttctcaacctagtcctgggagtgctttccggggaatttgccaaagagagagagagagtggagaaccgaagggctttcatgaagctgcggcgccagcagcagattgagcgtgagctgaatggctaccgtgcctggatagacaaagcagaggaagtcatgctcgctgaagaaaataaaaatgctggaacatccgccttagaagtgcttcgaagggcaaccatcaagaggagccggacagaggccatgactcgagactccagtgatgagcactgtgttgatatctcctctgtgggcacacctctggcccgagccagtatcaaaagtgcaaaggtagacggggtctcttatttccggcacaaggaaaggcttctgcgcatctccattcgccacatggttaaatcccaggtgttttactggattgtgctgagccttgtggcactcaacactgcctgtgtggccattgtccatcacaaccagccccagtggctcacccacctcctctactatgcagaatttctgtttctgggactcttcctcttggagatgtccctgaagatgtatggcatggggcctcgcctttattttcactcttcattcaactgctttgattttggggtcacagtgggcagtatctttgaagtggtctgggcaatcttcagacctggtacgtcttttggaatcagtgtcttgcgagccctccggcttctaagaatatttaaaataaccaagtattgggcttccctacggaatttggtggtctccttgatgagctcaatgaagtctatcatcagtttgcttttcctcctcttcctcttcatcgttgtctttgctctcctaggaatgcagttatttggaggcaggtttaactttaatgatgggactccttcggcaaattttgataccttccctgcagccatcatgactgtgttccagatcctgacgggtgaggactggaatgaggtgatgtacaatgggatccgctcccagggtggggtcagctcaggcatgtggtctgccatctacttcattgtgctcaccttgtttggcaactacacgctactgaatgtgttcttggctatcgctgtggataatctcgccaacgcccaggaactgaccaaggatgaacaggaggaagaagaggccttcaaccagaaacatgcactgcagaaggccaaggaggtcagcccgatgtctgcacccaacatgccttcgatcgaaagagacagaaggagaagacaccacatgtcgatgtgggagccacgcagcagccacctgagggagcggaggcgccggcaccacatgtccgtgtgggagcagcgtaccagccagctgaggaagcacatgcagatgtccagccaggaggccctcaacagagaggaggcgccgaccatgaacccgctcaaccccctcaacccgctcagctccctcaacccgctcaatgcccaccccagcctttatcggcgacccagggccattgagggcctggccctgggcctggccctggagaagttcgaggaggagcgcatcagccgtggggggtccctcaagggggatggaggggaccgatccagtgccctggacaaccagaggacccctttgtccctgggccagcgggagccaccatggctggccaggccctgtcatggaaactgtgacccgactcagcaggaggcagggggaggagaggctgtggtgacctttgaggaccgggccaggcacaggcagagccaacggcgcagccggcatcgccgcgtcaggacagaaggcaaggagtcctcttcagcctcccggagcaggtctgccagccaggaacgcagtctggatgaagccatgcccactgaaggggagaaggaccatgagctcaggggcaaccatggtgccaaggagccaacgatccaagaagagagagcccaggatttaaggaggaccaacagtctgatggtgtccagaggctccgggctggcaggaggccttgatgaggctgacacccccctagtcctgccccatcctgagctggaagtggggaagcacgtggtgctgacggagcaggagccagaaggcagcagtgagcaggccctgctggggaatgtgcagctagacatgggccgggtcatcagccagagcgagcctgacctctcctgcatcacggccaacacggacaaggccaccaccgagagcaccagcgtcaccgtcgccatccccgacgtggaccccttggtggactcaaccgtggtgcacattagcaacaagacggatggggaagccagtcccttgaaggaggcagagatcagagaggatgaggaggaggtggagaagaagaagcagaagaaggagaagcgtgagacaggcaaagccatggtgccccacagctcaatgttcatcttcagcaccaccaacccgatccggagggcctgccactacatcgtgaacctgcgctactttgagatgtgcatcctcctggtgattgcagccagcagcatcgccctggcggcagaggaccccgtcctgaccaactcggagcgcaacaaagtcctgaggtattttgactatgtgttcacgggcgtgttcacctttgagatggttataaagatgatagaccaaggcttgatcctgcaggatgggtcctacttccgagacttgtggaacatcctggactttgtggtggtcgttggcgcattggtggcctttgctctggcgaacgctttgggaaccaacaaaggacgggacatcaagaccatcaagtctctgcgggtgctccgagttctaaggccactgaaaaccatcaagcgcttgcccaagctcaaggccgtcttcgactgcgtagtgacctccttgaagaatgtcttcaacatactcattgtgtacaagctcttcatgttcatctttgctgtcatcgcagttcagctcttcaagggaaagttcttttattgcacggacagttccaaggacacagagaaggagtgcataggcaactatgtagatcatgagaaaaacaagatggaggtgaagggccgggaatggaagcgccatgaattccactacgacaacattatctgggccctgctgaccctcttcaccgtctccacaggggaaggatggcctcaagttctgcagcactctgtagatgtgacagaggaagaccgaggcccaagccgcagcaaccgcatggagatgtctatcttttatgtagtctactttgtggtcttccccttcttctttgtcaatatctttgtggctctcatcatcatcaccttccaggagcaaggggataagatgatggaggagtgcagcctggagaagaatgagagggcgtgcatcgacttcgccatcagcgccaaacctctcacccgctacatgccgcagaacagacacaccttccagtaccgcgtgtggcactttgtggtgtctccgtcctttgagtacaccattatggccatgatcgccttgaatactgttgtgctgatgatgaagtattattctgctccctgtacctatgagctggccctgaagtacctgaatatcgccttcaccatggtgttttccctggaatgtgtcctgaaggtcatcgcttttggctttttgaactatttccgagacacctggaatatctttgacttcatcaccgtgattggcagtatcacagaaattatcctgacagacagcaagctggtgaacaccagtggcttcaatatgagctttctgaagctcttccgagctgcccgcctcataaagctcctgcgtcagggctataccatacgcattttgctgtggacctttgtgcagtcctttaaggccctcccttatgtctgccttttaattgccatgcttttcttcatttatgccatcattgggatgcaggtatttggaaacataaaattagacgaggagagtcacatcaaccggcacaacaacttccggagtttctttgggtccctaatgctactcttcaggagtgccacaggtgaggcctggcaggagattatgctgtcatgccttggggagaagggctgtgagcctgacaccaccgcaccatcagggcagaacgagaacgaacgctgcggcaccgatctggcctacgtgtactttgtctccttcatcttcttctgctccttcttgatgctcaacctgtttgtggccgtcatcatggacaactttgagtacctgactcgggactcctccatcctggggcctcaccacttggacgagtttgtccgcgtctgggcagaatatgaccgagcagcatgtggccgcatccattacactgagatgtatgaaatgctgactctcatgtcacctccgctaggcctcggcaagagatgtccctccaaagtggcatataagaggttggtcctgatgaacatgccagtagctgaggacatgacggtccacttcacctccacacttatggctctgatccggacagctctggacattaaaattgccaaaggtggtgcagacaggcagcagctagactcagagctacaaaaggagaccctagccatctggcctcacctatcccagaagatgctggatctgcttgtgcccatgcccaaagcctctgacctgactgtgggcaaaatctatgcagcaatgatgatcatggactactataagcagagtaaggtgaagaagcagaggcagcagctggaggaacagaaaaatgcccccatgttccagcgcatggagccttcatctctgcctcaggagatcattgctaatgccaaagccctgccttacctccagcaggaccccgtttcaggcctgagtggccggagtggatacccttcgatgagtccactctctccccaggatatattccagttggcttgtatggaccccgccgatgacggacagttccaagaacggcagtctctggtggtgacagaccctagctccatgagacgttcattttccactattcgggataagcgttcaaattcctcgtggttggaggaattctccatggagcgaagcagtgaaaatacctacaagtcccgtcgccggagttaccactcctccttgcggctgtcagcccaccgcctgaactctgattcaggccacaagtctgacactcaccgctcagggggcagggagcggggacgatcaaaagagcgaaagcatcttctctctcctgatgtctcccgctgcaattcagaagagcgagggacccaggctgactgggagtccccagagcgccgtcaatccaggtcacccagtgagggcaggtcacagacgcccaacagacagggcacaggttccctaagtgagagctccatcccctctgtctctgacaccagcaccccaagaagaagtcgtcggcagctcccacccgtcccgccaaagccccggcccctcctttcctacagctccctgattcgacacgcgggcagcatctctccacctgctgatggaagcgaggagggctccccgctgacctcccaagctctggagagcaacaatgcttgcctgaccgagtcttccaactctccgcacccccagcagagccaacatgcctccccacagcgctacatctccgagccctacttggccctgcacgaagactcccacgcctcagactgtggtgaggaggagacgctcactttcgaagcagccgtggctactagcctgggccgttccaacaccatcggctcagccccacccctgcggcatagctggcagatgcccaacgggcactatcggcggcggaggcgcggggggcctgggccaggcatgatgtgtggggctgtcaacaacctgctaagtgacacggaagaagatgacaaatgctagaggctgctcccccctccgatgcatgctcttctctcacatggagaaaaccaagacagaattgggaagccagtgcggcccgggggggaggaagagggaaaaggaagatggaag

SEQ ID NO: 1271 - protein, 2270 aa, Homo sapiens
MARFGEAVVARPGSGDGDSDQSRNRQGTPVPASGQAAAYKQTKAQRARTMALYNPIPVRQNCFTVNRSLFIFGEDNIVRKYAKKLIDWPPFEYMILATIIANCIVLALEQHLPEDDKTPMSRRLEKTEPYFIGIFCFEAGIKIVALGFIFHKGSYLRNGWNVMDFIVVLSGILATAGTHFNTHVDLRTLRAVRVLRPLKLVSGIPSLQIVLKSIMKAMVPLLQIGLLLFFAILMFAIIGLEFYSGKLHRACFMNNSGILEGFDPPHPCGVQGCPAGYECKDWIGPNDGITQFDNILFAVLTVFQCITMEGWTTVLYNTNDALGATWNWLYFIPLIIIGSFFVLNLVLGVLSGEFAKERERVENRRAFMKLRRQQQIERELNGYRAWIDKAEEVMLAEENKNAGTSALEVLRRATIKRSRTEAMTRDSSDEHCVDISSVGTPLARASIKSAKVDGVSYFRHKERLLRISIRHMVKSQVFYWIVLSLVALNTACVAIVHHNQPQWLTHLLYYAEFLFLGLFLLEMSLKMYGMGPRLYFHSSFNCFDFGVTVGSIFEVVWAIFRPGTSFGISVLRALRLLRIFKITKYWASLRNLVVSLMSSMKSIISLLFLLFLFIVVFALLGMQLFGGRFNFNDGTPSANFDTFPAAIMTVFQILTGEDWNEVMYNGIRSQGGVSSGMWSAIYFIVLTLFGNYTLLNVFLAIAVDNLANAQELTKDEQEEEEAFNQKHALQKAKEVSPMSAPNMPSIERDRRRRHHMSMWEPRSSHLRERRRRHHMSVWEQRTSQLRKHMQMSSQEALNREEAPTMNPLNPLNPLSSLNPLNAHPSLYRRPRAIEGLALGLALEKFEEERISRGGSLKGDGGDRSSALDNQRTPLSLGQREPPWLARPCHGNCDPTQQEAGGGEAVVTFEDRARHRQSQRRSRHRRVRTEGKESSSASRSRSASQERSLDEAMPTEGEKDHELRGNHGAKEPTIQEERAQDLRRTNSLMVSRGSGLAGGLDEADTPLVLPHPELEVGKHVVLTEQEPEGSSEQALLGNVQLDMGRVISQSEPDLSCITANTDKATTESTSVTVAIPDVDPLVDSTVVHISNKTDGEASPLKEAEIREDEEEVEKKKQKKEKRETGKAMVPHSSMFIFSTTNPIRRACHYIVNLRYFEMCILLVIAASSIALAAEDPVLTNSERNKVLRYFDYVFTGVFTFEMVIKMIDQGLILQDGSYFRDLWNILDFVVVVGALVAFALANALGTNKGRDIKTIKSLRVLRVLRPLKTIKRLPKLKAVFDCVVTSLKNVFNILIVYKLFMFIFAVIAVQLFKGKFFYCTDSSKDTEKECIGNYVDHEKNKMEVKGREWKRHEFHYDNIIWALLTLFTVSTGEGWPQVLQHSVDVTEEDRGPSRSNRMEMSIFYVVYFVVFPFFFVNIFVALIIITFQEQGDKMMEECSLEKNERACIDFAISAKPLTRYMPQNRHTFQYRVWHFVVSPSFEYTIMAMIALNTVVLMMKYYSAPCTYELALKYLNIAFTMVFSLECVLKVIAFGFLNYFRDTWNIFDFITVIGSITEIILTDSKLVNTSGFNMSFLKLFRAARLIKLLRQGYTIRILLWTFVQSFKALPYVCLLIAMLFFIYAIIGMQVFGNIKLDEESHINRHNNFRSFFGSLMLLFRSATGEAWQEIMLSCLGEKGCEPDTTAPSGQNENERCGTDLAYVYFVSFIFFCSFLMLNLFVAVIMDNFEYLTRDSSILGPHHLDEFVRVWAEYDRAACGRIHYTEMYEMLTLMSPPLGLGKRCPSKVAYKRLVLMNMPVAEDMTVHFTSTLMALIRTALDIKIAKGGADRQQLDSELQKETLAIWPHLSQKMLDLLVPMPKASDLTVGKIYAAMMIMDYYKQSKVKKQRQQLEEQKNAPMFQRMEPSSLPQEIIANAKALPYLQQDPVSGLSGRSGYPSMSPLSPQDIFQLACMDPADDGQFQERQSLVVTDPSSMRRSFSTIRDKRSNSSWLEEFSMERSSENTYKSRRRSYHSSLRLSAHRLNSDSGHKSDTHRSGGRERGRSKERKHLLSPDVSRCNSEERGTQADWESPERRQSRSPSEGRSQTPNRQGTGSLSESSIPSVSDTSTPRRSRRQLPPVPPKPRPLLSYSSLIRHAGSISPPADGSEEGSPLTSQALESNNACLTESSNSPHPQQSQHASPQRYISEPYLALHEDSHASDCGEEETLTFEAAVATSLGRSNTIGSAPPLRHSWQMPNGHYRRRRRGGPGPGMMCGAVNNLLSDTEEDDKC

SEQ ID NO: 1272 - DNA, 7477 bp, Homo sapiens
gatgcgtggactgagcccagaccgcaggctgcccgagcccgccccctgcccggctgcggggagccctgagcccaggtccgcgggccgccgccaacgccacgtcctggccctgccggaagaagaggcatggcggccccagcagtgcgctctgctcgaggccgacgcctcggacgaggtgggcatgctgccggcttccccgcgcgccgcctctggcttcgacaacttcttccaggtgcaggagggcgagggccagggctgggagggcgccatggcactggaggcgggctccagccctttcctgccggtgagccccgaggtcatgaagcggcggcgcgggggcctcatcgagcagcgcgacatcatcaaggcccacgaggcgcacaagatgcagagcaccccgcaggcccggcgcaaggaatgggagatggctcgcttcggggaggcggtggtcgccaggccagggtccggcgatggagactcggaccagagcaggaaccggcaaggaacccccgtgccggcctcggggcaggcggccgcctacaagcagacgaaagcacagagggcgcggactatggctttgtacaaccccattcccgtccggcagaactgtttcaccgtcaacagatccctgttcatcttcggagaagataacattgtcaggaaatatgccaagaagctcatcgattggccaccatttgagtacatgatcctggccaccatcattgccaactgcatcgtcctggccctggagcagcatcttcctgaggatgacaagacccccatgtcccgaagactggagaagacagaaccttatttcattgggatcttttgctttgaagctgggatcaaaattgtggccctggggttcatcttccataagggctcttacctccgcaatggctggaatgtcatggacttcatcgtggtcctcagtggcatcctggccactgcaggaacccacttcaatactcacgtggacctgaggaccctccgggctgtgcgtgtcctgcggcctttgaagctcgtgtcagggatacctagcctgcagattgtgttgaagtccatcatgaaggccatggtacctcttctgcagattggccttctgctcttctttgccatcctgatgtttgctatcattggtttggagttctacagtggcaagttacatcgagcatgcttcatgaacaattcaggtattctagaaggatttgacccccctcacccatgtggtgtgcagggctgcccagctggttatgaatgcaaggactggatcggccccaatgatgggatcacccagtttgataacatcctttttgctgtgctgactgtcttccagtgcatcaccatggaagggtggaccactgtgctgtacaataccaatgatgccttaggagccacctggaattggctgtacttcatccccctcatcatcattggatccttctttgttctcaacctagtcctgggagtgctttccggggaatttgccaaagagagagagagagtggagaaccgaagggctttcatgaagctgcggcgccagcagcagattgagcgtgagctgaatggctaccgtgcctggatagacaaagcagaggaagtcatgctcgctgaagaaaataaaaatgctggaacatccgccttagaagtgcttcgaagggcaaccatcaagaggagccggacagaggccatgactcgagactccagtgatgagcactgtgttgatatctcctctgtgggcacacctctggcccgagccagtatcaaaagtgcaaaggtagacggggtctcttatttccggcacaaggaaaggcttctgcgcatctccattcgccacatggttaaatcccaggtgttttactggattgtgctgagccttgtggcactcaacactgcctgtgtggccattgtccatcacaaccagccccagtggctcacccacctcctctactatgcagaatttctgtttctgggactcttcctcttggagatgtccctgaagatgtatggcatggggcctcgcctttattttcactcttcattcaactgctttgattttggggtcacagtgggcagtatctttgaagtggtctgggcaatcttcagacctggtacgtcttttggaatcagtgtcttgcgagccctccggcttctaagaatatttaaaataaccaagtattgggcttccctacggaatttggtggtctccttgatgagctcaatgaagtctatcatcagtttgcttttcctcctcttcctcttcatcgttgtctttgctctcctaggaatgcagttatttggaggcaggtttaactttaatgatgggactccttcggcaaattttgataccttccctgcagccatcatgactgtgttccagatcctgacgggtgaggactggaatgaggtgatgtacaatgggatccgctcccagggtggggtcagctcaggcatgtggtctgccatctacttcattgtgctcaccttgtttggcaactacacgctactgaatgtgttcttggctatcgctgtggataatctcgccaacgcccaggaactgaccaaggatgaacaggaggaagaagaggccttcaaccagaaacatgcactgcagaaggccaaggaggtcagcccgatgtctgcacccaacatgccttcgatcgaaagagacagaaggagaagacaccacatgtcgatgtgggagccacgcagcagccacctgagggagcggaggcgccggcaccacatgtccgtgtgggagcagcgtaccagccagctgaggaagcacatgcagatgtccagccaggaggccctcaacagagaggaggcgccgaccatgaacccgctcaaccccctcaacccgctcagctccctcaacccgctcaatgcccaccccagcctttatcggcgacccagggccattgagggcctggccctgggcctggccctggagaagttcgaggaggagcgcatcagccgtggggggtccctcaagggggatggaggggaccgatccagtgccctggacaaccagaggacccctttgtccctgggccagcgggagccaccatggctggccaggccctgtcatggaaactgtgacccgactcagcaggaggcagggggaggagaggctgtggtgacctttgaggaccgggccaggcacaggcagagccaacggcgcagccggcatcgccgcgtcaggacagaaggcaaggagtcctcttcagcctcccggagcaggtctgccagccaggaacgcagtctggatgaagccatgcccactgaaggggagaaggaccatgagctcaggggcaaccatggtgccaaggagccaacgatccaagaagagagagcccaggatttaaggaggaccaacagtctgatggtgtccagaggctccgggctggcaggaggccttgatgaggctgacacccccctagtcctgccccatcctgagctggaagtggggaagcacgtggtgctgacggagcaggagccagaaggcagcagtgagcaggccctgctggggaatgtgcagctagacatgggccgggtcatcagccagagcgagcctgacctctcctgcatcacggccaacacggacaaggccaccaccgagagcaccagcgtcaccgtcgccatccccgacgtggaccccttggtggactcaaccgtggtgcacattagcaacaagacggatggggaagccagtcccttgaaggaggcagagatcagagaggatgaggaggaggtggagaagaagaagcagaagaaggagaagcgtgagacaggcaaagccatggtgccccacagctcaatgttcatcttcagcaccaccaacccgatccggagggcctgccactacatcgtgaacctgcgctactttgagatgtgcatcctcctggtgattgcagccagcagcatcgccctggcggcagaggaccccgtcctgaccaactcggagcgcaacaaagtcctgaggtattttgactatgtgttcacgggcgtgttcacctttgagatggttataaagatgatagaccaaggcttgatcctgcaggatgggtcctacttccgagacttgtggaacatcctggactttgtggtggtcgttggcgcattggtggcctttgctctggcgaacgctttgggaaccaacaaaggacgggacatcaagaccatcaagtctctgcgggtgctccgagttctaaggccactgaaaaccatcaagcgcttgcccaagctcaaggccgtcttcgactgcgtagtgacctccttgaagaatgtcttcaacatactcattgtgtacaagctcttcatgttcatctttgctgtcatcgcagttcagctcttcaagggaaagttcttttattgcacggacagttccaaggacacagagaaggagtgcataggcaactatgtagatcatgagaaaaacaagatggaggtgaagggccgggaatggaagcgccatgaattccactacgacaacattatctgggccctgctgaccctcttcaccgtctccacaggggaaggatggcctcaagttctgcagcactctgtagatgtgacagaggaagaccgaggcccaagccgcagcaaccgcatggagatgtctatcttttatgtagtctactttgtggtcttccccttcttctttgtcaatatctttgtggctctcatcatcatcaccttccaggagcaaggggataagatgatggaggagtgcagcctggagaagaatgagagggcgtgcatcgacttcgccatcagcgccaaacctctcacccgctacatgccgcagaacagacacaccttccagtaccgcgtgtggcactttgtggtgtctccgtcctttgagtacaccattatggccatgatcgccttgaatactgttgtgctgatgatgaagtattattctgctccctgtacctatgagctggccctgaagtacctgaatatcgccttcaccatggtgttttccctggaatgtgtcctgaaggtcatcgcttttggctttttgaactatttccgagacacctggaatatctttgacttcatcaccgtgattggcagtatcacagaaattatcctgacagacagcaagctggtgaacaccagtggcttcaatatgagctttctgaagctcttccgagctgcccgcctcataaagctcctgcgtcagggctataccatacgcattttgctgtggacctttgtgcagtcctttaaggccctcccttatgtctgccttttaattgccatgcttttcttcatttatgccatcattgggatgcaggtatttggaaacataaaattagacgaggagagtcacatcaaccggcacaacaacttccggagtttctttgggtccctaatgctactcttcaggagtgccacaggtgaggcctggcaggagattatgctgtcatgccttggggagaagggctgtgagcctgacaccaccgcaccatcagggcagaacgagaacgaacgctgcggcaccgatctggcctacgtgtactttgtctccttcatcttcttctgctccttcttgatgctcaacctgtttgtggccgtcatcatggacaactttgagtacctgactcgggactcctccatcctggggcctcaccacttggacgagtttgtccgcgtctgggcagaatatgaccgagcagcatgtggccgcatccattacactgagatgtatgaaatgctgactctcatgtcacctccgctaggcctcggcaagagatgtccctccaaagtggcatataagaggttggtcctgatgaacatgccagtagctgaggacatgacggtccacttcacctccacacttatggctctgatccggacagctctggacattaaaattgccaaaggtggtgcagacaggcagcagctagactcagagctacaaaaggagaccctagccatctggcctcacctatcccagaagatgctggatctgcttgtgcccatgcccaaagcctctgacctgactgtgggcaaaatctatgcagcaatgatgatcatggactactataagcagagtaaggtgaagaagcagaggcagcagctggaggaacagaaaaatgcccccatgttccagcgcatggagccttcatctctgcctcaggagatcattgctaatgccaaagccctgccttacctccagcaggaccccgtttcaggcctgagtggccggagtggatacccttcgatgagtccactctctccccaggatatattccagttggcttgtatggaccccgccgatgacggacagttccaagaacggcagtctctggagccagaggttagtgaattaaaaagcgtgcagccctctaaccatggcatctaccttccttcggacacccaggagcatgcgggatctgggagggcatcttctatgccacgtctgactgtggatccccaggtggtgacagaccctagctccatgagacgttcattttccactattcgggataagcgttcaaattcctcgtggttggaggaattctccatggagcgaagcagtgaaaatacctacaagtcccgtcgccggagttaccactcctccttgcggctgtcagcccaccgcctgaactctgattcaggccacaagtctgacactcaccgctcagggggcagggagcggggacgatcaaaagagcgaaagcatcttctctctcctgatgtctcccgctgcaattcagaagagcgagggacccaggctgactgggagtccccagagcgccgtcaatccaggtcacccagtgagggcaggtcacagacgcccaacagacagggcacaggttccctaagtgagagctccatcccctctgtctctgacaccagcaccccaagaagaagtcgtcggcagctcccacccgtcccgccaaagccccggcccctcctttcctacagctccctgattcgacacgcgggcagcatctctccacctgctgatggaagcgaggagggctccccgctgacctcccaagctctggagagcaacaatgcttgcctgaccgagtcttccaactctccgcacccccagcagagccaacatgcctccccacagcgctacatctccgagccctacttggccctgcacgaagactcccacgcctcagactgtggtgaggaggagacgctcactttcgaagcagccgtggctactagcctgggccgttccaacaccatcggctcagccccacccctgcggcatagctggcagatgcccaacgggcactatcggcggcggaggcgcggggggcctgggccaggcatgatgtgtggggctgtcaacaacctgctaagtgacacggaagaagatgacaaatgctagaggctgctcccccctccgatgcatgctcttctctcacatggagaaaaccaagacagaattgggaagccagtgcggcccgggggggaggaagagggaaaaggaagatggaag

SEQ ID NO: 1273 - protein, 2313 aa, Homo sapiens
MARFGEAVVARPGSGDGDSDQSRNRQGTPVPASGQAAAYKQTKAQRARTMALYNPIPVRQNCFTVNRSLFIFGEDNIVRKYAKKLIDWPPFEYMILATIIANCIVLALEQHLPEDDKTPMSRRLEKTEPYFIGIFCFEAGIKIVALGFIFHKGSYLRNGWNVMDFIVVLSGILATAGTHFNTHVDLRTLRAVRVLRPLKLVSGIPSLQIVLKSIMKAMVPLLQIGLLLFFAILMFAIIGLEFYSGKLHRACFMNNSGILEGFDPPHPCGVQGCPAGYECKDWIGPNDGITQFDNILFAVLTVFQCITMEGWTTVLYNTNDALGATWNWLYFIPLIIIGSFFVLNLVLGVLSGEFAKERERVENRRAFMKLRRQQQIERELNGYRAWIDKAEEVMLAEENKNAGTSALEVLRRATIKRSRTEAMTRDSSDEHCVDISSVGTPLARASIKSAKVDGVSYFRHKERLLRISIRHMVKSQVFYWIVLSLVALNTACVAIVHHNQPQWLTHLLYYAEFLFLGLFLLEMSLKMYGMGPRLYFHSSFNCFDFGVTVGSIFEVVWAIFRPGTSFGISVLRALRLLRIFKITKYWASLRNLVVSLMSSMKSIISLLFLLFLFIVVFALLGMQLFGGRFNFNDGTPSANFDTFPAAIMTVFQILTGEDWNEVMYNGIRSQGGVSSGMWSAIYFIVLTLFGNYTLLNVFLAIAVDNLANAQELTKDEQEEEEAFNQKHALQKAKEVSPMSAPNMPSIERDRRRRHHMSMWEPRSSHLRERRRRHHMSVWEQRTSQLRKHMQMSSQEALNREEAPTMNPLNPLNPLSSLNPLNAHPSLYRRPRAIEGLALGLALEKFEEERISRGGSLKGDGGDRSSALDNQRTPLSLGQREPPWLARPCHGNCDPTQQEAGGGEAVVTFEDRARHRQSQRRSRHRRVRTEGKESSSASRSRSASQERSLDEAMPTEGEKDHELRGNHGAKEPTIQEERAQDLRRTNSLMVSRGSGLAGGLDEADTPLVLPHPELEVGKHVVLTEQEPEGSSEQALLGNVQLDMGRVISQSEPDLSCITANTDKATTESTSVTVAIPDVDPLVDSTVVHISNKTDGEASPLKEAEIREDEEEVEKKKQKKEKRETGKAMVPHSSMFIFSTTNPIRRACHYIVNLRYFEMCILLVIAASSIALAAEDPVLTNSERNKVLRYFDYVFTGVFTFEMVIKMIDQGLILQDGSYFRDLWNILDFVVVVGALVAFALANALGTNKGRDIKTIKSLRVLRVLRPLKTIKRLPKLKAVFDCVVTSLKNVFNILIVYKLFMFIFAVIAVQLFKGKFFYCTDSSKDTEKECIGNYVDHEKNKMEVKGREWKRHEFHYDNIIWALLTLFTVSTGEGWPQVLQHSVDVTEEDRGPSRSNRMEMSIFYVVYFVVFPFFFVNIFVALIIITFQEQGDKMMEECSLEKNERACIDFAISAKPLTRYMPQNRHTFQYRVWHFVVSPSFEYTIMAMIALNTVVLMMKYYSAPCTYELALKYLNIAFTMVFSLECVLKVIAFGFLNYFRDTWNIFDFITVIGSITEIILTDSKLVNTSGFNMSFLKLFRAARLIKLLRQGYTIRILLWTFVQSFKALPYVCLLIAMLFFIYAIIGMQVFGNIKLDEESHINRHNNFRSFFGSLMLLFRSATGEAWQEIMLSCLGEKGCEPDTTAPSGQNENERCGTDLAYVYFVSFIFFCSFLMLNLFVAVIMDNFEYLTRDSSILGPHHLDEFVRVWAEYDRAACGRIHYTEMYEMLTLMSPPLGLGKRCPSKVAYKRLVLMNMPVAEDMTVHFTSTLMALIRTALDIKIAKGGADRQQLDSELQKETLAIWPHLSQKMLDLLVPMPKASDLTVGKIYAAMMIMDYYKQSKVKKQRQQLEEQKNAPMFQRMEPSSLPQEIIANAKALPYLQQDPVSGLSGRSGYPSMSPLSPQDIFQLACMDPADDGQFQERQSLEPEVSELKSVQPSNHGIYLPSDTQEHAGSGRASSMPRLTVDPQVVTDPSSMRRSFSTIRDKRSNSSWLEEFSMERSSENTYKSRRRSYHSSLRLSAHRLNSDSGHKSDTHRSGGRERGRSKERKHLLSPDVSRCNSEERGTQADWESPERRQSRSPSEGRSQTPNRQGTGSLSESSIPSVSDTSTPRRSRRQLPPVPPKPRPLLSYSSLIRHAGSISPPADGSEEGSPLTSQALESNNACLTESSNSPHPQQSQHASPQRYISEPYLALHEDSHASDCGEEETLTFEAAVATSLGRSNTIGSAPPLRHSWQMPNGHYRRRRRGGPGPGMMCGAVNNLLSDTEEDDKC

SEQ ID NO: 1274 - DNA, 2106 bp, Homo sapiens
gggtagaatccgccaagctttgagagaaggctgtgactgctgtgctctgggcgccagctcgctccagggagtgatgggaatcctgtcattcttacctgtccttgccactgagagtgactgggctgactgcaagtccccccagccttggggtcatatgcttctgtggacagctgtgctattcctggctcctgttgctgggacacctgcagctcccccaaaggctgtgctgaaactcgagccccagtggatcaacgtgctccaggaggactctgtgactctgacatgccgggggactcacagccctgagagcgactccattcagtggttccacaatgggaatctcattcccacccacacgcagcccagctacaggttcaaggccaacaacaatgacagcggggagtacacgtgccagactggccagaccagcctcagcgaccctgtgcatctgactgtgctttctgagtggctggtgctccagacccctcacctggagttccaggagggagaaaccatcgtgctgaggtgccacagctggaaggacaagcctctggtcaaggtcacattcttccagaatggaaaatccaagaaattttcccgttcggatcccaacttctccatcccacaagcaaaccacagtcacagtggtgattaccactgcacaggaaacataggctacacgctgtactcatccaagcctgtgaccatcactgtccaagctcccagctcttcaccgatggggatcattgtggctgtggtcactgggattgctgtagcggccattgttgctgctgtagtggccttgatctactgcaggaaaaagcggatttcagctctcccaggataccctgagtgcagggaaatgggagagaccctccctgagaaaccagccaatcccactaatcctgatgaggctgacaaagttggggctgagaacacaatcacctattcacttctcatgcacccggatgctctggaagagcctgatgaccagaaccgtatttagtctccattgtcttgcattgggatttgagaagaaaatcagagagggaagatctggtatttcctggcctaaattccccttggggaggacagggagatgctgcagttccaaaagagaaggtttcttccagagtcatctacctgagtcctgaagctccctgtcctgaaagccacagacaatatggtcccaaatgaccgactgcaccttctgtgcttcagctcttcttgacatcaaggctcttccgttccacatccacacagccaatccaattaatcaaaccactgttattaacagataatagcaacttgggaaatgcttatgttacaggttacgtgagaacaatcatgtaaatctatatgatttcagaaatgttaaaatagactaacctctaccagcacattaaaagtgattgtttctgggtgataaaattattgatgatttttattttctttatttttctataaagatcatatattacttttataataaaacattataaaaacaacattctgtttaccttttcaaggctgtattggttggagtgtagactgaactgcctggggtctgtttctcttcagtgatgagactcttaggaaggcaggaatggataggatagggggaggagaggagagatggggatttagaatgtagagtgagtgccccttttcttaaaactgaatacagtcacgcaccacataatgatgtttagttcaacaacagactgcatatatgatggtgatcccataaaattataataccatatttctattgtaccttttctattcctatgtttagatatatgagtacttaccattgtgttacaattgcctaaagtattcagtacagtagcatgctgtacaggtttgtagcctaggggcaataggctatacgctacagcctaggtgtgtagtaggccacaccatttaggtttgtataagtacctgctatgatgttcacacaacaaaattgcctgcatttctcaaaatgtatccccatatttcaacaatgcatgactgtactcttctgccaatgaccttgtattcttgtttccatgtcttcttctctttcctcctatggcaaataaaacactgttttgcaacaca

SEQ ID NO: 1275 - protein, 310 aa, Homo sapiens
MGILSFLPVLATESDWADCKSPQPWGHMLLWTAVLFLAPVAGTPAAPPKAVLKLEPQWINVLQEDSVTLTCRGTHSPESDSIQWFHNGNLIPTHTQPSYRFKANNNDSGEYTCQTGQTSLSDPVHLTVLSEWLVLQTPHLEFQEGETIVLRCHSWKDKPLVKVTFFQNGKSKKFSRSDPNFSIPQANHSHSGDYHCTGNIGYTLYSSKPVTITVQAPSSSPMGIIVAVVTGIAVAAIVAAVVALIYCRKKRISALPGYPECREMGETLPEKPANPTNPDEADKVGAENTITYSLLMHPDALEEPDDQNRI

SEQ ID NO: 1276 - DNA, 5296 bp, Homo sapiens
ctgccggatagtgctgaagaggagggggcgttccccagaccatggcatctacggaaggtgccaacaatatgcccaagcaggtggaagtgcgaatgcacgacagtcatcttggctcagaggaacccaagcaccggcacctgggcctgcgcctgtgtgacaagctggggaagaatctgctgctcaccctgacggtgtttggtgtcatcctgggagcagtgtgtggagggcttcttcgcttggcatctcccatccaccctgatgtggttatgttaatagccttcccaggggatatactcatgaggatgctaaaaatgctcattctccctctaatcatctccagcttaatcacagggttgtcaggcctggatgctaaggctagtggccgcttgggcacgagagccatggtgtattacatgtccacgaccatcattgctgcagtactgggggtcattctggtcttggctatccatccaggcaatcccaagctcaagaagcagctggggcctgggaagaagaatgatgaagtgtccagcctggatgccttcctggaccttattcgaaatctcttccctgaaaaccttgtccaagcctgctttcaacagattcaaacagtgacgaagaaagtcctggttgcaccaccgccggacgaggaggccaacgcaaccagcgctgttgtctctctgttgaacgagactgtgactgaggtgccggaggagactaagatggttatcaagaagggcctggagttcaaggatgggatgaacgtcttaggtctgatagggtttttcattgcttttggcatcgctatggggaagatgggagatcaggccaagctgatggtggatttcttcaacattttgaatgagattgtaatgaagttagtgatcatgatcatgtggtactctcccctgggtatcgcctgcctgatctgtggaaagatcattgcaatcaaggacttagaagtggttgctaggcaactggggatgtacatggtaacagtgatcataggcctcatcatccacgggggcatctttctccccttgatttactttgtagtgaccaggaaaaaccccttctccttttttgctggcattttccaagcttggatcactgccctgggcaccgcttccagtgctggaactttgcctgtcacctttcgttgcctggaagaaaatctggggattgataagcgtgtgactagattcgtccttcctgttggagcaaccattaacatggatggtacagccctttatgaagcggtagccgccatctttatagcccaaatgaatggtgttgtcctggatggaggacagattgtgactgtaagcctcacagccaccctggcaagcgtcggcgcggccagtatccccagtgccgggctggtcaccatgctcctcattctgacagccgtgggcctgccaacagaggacatcagcctgctggtggctgtggactggctgctggacaggatgagaacttcagtcaatgttgtgggtgactcttttggggctgggatagtctatcacctctccaagtctgagctggataccattgactcccagcatcgagtgcatgaagatattgaaatgaccaagactcaatccatttatgatgacatgaagaaccacagggaaagcaactctaatcaatgtgtctatgctgcacacaactctgtcatagtagatgaatgcaagggcccttttgtgctgagaataaaaccagctattggaacagacctcactgctttgtagagtcagaagttgacctagagaatgggtagcaacaggtcctcagtttctctggagacacccccaatccttgggtgagtgttgaaacctgacaactgactgttagccttgtcatcatcctcactggagatggagatgttgcagtcggagcctcactccttctggggcactgtttcttctcatggcaaccattttgcctgcctggaaacagcctgttgcctttgctagggggcaaatacacacactagccaaggaagttggtccagcacatctctgaggtttctcccccatggacccatggagcgaattccctgagataaatgatcagaaagttggctgtctggtggtttaatactccataagagttacttcccttatagaaagtcatcctttggcatctagatttttctacaaatcaccttaactccctccctttctctttctcctggaaaacctcagcattgcatctccatgttgcacaacacagatcagattatctggtcactatagagatttgtatataaaaaaactacttttttgaggattttgtatattgtttttctatttgttttctacagcttgaggaaagagctggcaaactgtgaatctaacttgatcttgttgccagcagatatattttggcttcctggtaagagtctgtgttaccagggacaatatattgccctctgatcagtattgcaccctaaatccacaaattcctccagcccagtcttacatttttttaaacaaatcccctagcttgtttgctattatttataaagagcattagaaaatgtatttatagacctggatgttatatgtttaatattaatttagcctttaataatgttataggtttgtaactattcttcagaaattataaagaactcagtgtagactgaattaatctatttagtatctgtaattttgcagacatattttcttacagtattttctatgtaaccacacatgtagaattataactaattagagcacaagaagtttcttcagcaatttagagctaccaattgtttcttgactatatagtcacatttgacaaatttaagaacccagtctttagtgatgcaataaacaaaatgaaccattaagaacaaggaattgcttaaatcccttagctggtgaggatatacatctaaataattcatctttctaactcaaggaatggtgctgattttttaaatgtttgacaccaggccttgtttttccagctgagcattctcattttgcttttctctaagactatcaaagacaaggtattaatagtaggattattcctagatcagaatgtttcatacattcctaaaggtttatgtggaaattggcttaggaaaactttgagtagcagagactgaggatgagtgctagagatgaaatcaggacagatttgttgcagttaattcttgccaagcaaattagtggtaaatgtcacattgttatgtgaattgagcacatatttttaaagaaagtttacaaaaaatttttagaaccaactatgaggcaatactgtatcactgggggctgggagtgggggcttagaatcatactgaaattgtttaaaagcagcccaggtagtttctgtcctcaggtgaataacagactatataacttccccgaaaggtaaaacgatagccactgcagagacgaggtgtcttccttccaccaaatactttctgagatggtggtaggagtagtatttttaccgtggtttaaaaagtagtcagttacatagaaagtgtattggtatgtatttgaacctgctcttcattaaacaaacagattagatgtaccctcgactggcaataattgtatctattttcaagtacagctagctgtcaaagcatgaagctcttgtgtatacacactgacacttggttcacgcatgaagaacagtgcctatgcactttgtgtagctataatgtaggtatctaggtgtaatttcagtgaaatggtgtatagatgtattgtaatttaaatgtatatgttatttttggctattcatctaaatgcagtagacatgttgatcggtgttttgcaaacatttctttttccttcttagataactagtcgtgaatcatttctcctctttctcagtgtggcttgggaatatatatgagtgaagaatttatctgtgaatcctttgtactgatgattgtttgaaagtctgtgtgtgtccagcacctttgtaaatacacaattcagagcagggatgggctgggtgtgtgtcctggttcttagtgaaaggtcatctcatgtctgtttaatacatggtgaatgcaactgtggaacttttgattacctagacttaggtaggtttagaatgagaacatccatctacagtcctcctttgcttggtggattgggctcagaggaacaaaaagttagtctgactctgtgcatattagcatcatgtctttagagaaaggtcagcctctctggttgccaaatactcatcatgatgctcatgacttaaaggttctgaggagccttgtctcccttggatttttgagtcagggtacaggaaaaaacattgctgactaactaactgcaaatgcatctgcaggtgaaaccctacgaaagcacagttctggctataaacttcagagttctctgtaaaaaacttagagcactagaagcacaggaatagtgagtgtacagcttatgcggttgtagaggggcaactgatgaacacaggtcccacatatatgagggagtatgacgttctctacctaatatgttctgtgtgcatgttttgaatgattgaagatgggattaactaatgcaagtttacagttgcctcctaaaacacacattctgtataattatcgctaaatacaatgctgtgaggtctatagttcctgtaacccctttctcctccccaaggacagagaagaactagccatgtgctatagggaaccctgagtgccctactcttttcccaagaagggtaaagcctacaatatcatcagggggcatgaagcacattaatttgcagtggctgcttcatatgaggagatatggtggacaggctaatttttccttgaaaatgtggcttcttcaactcctttcaaatttaggatggaatacttcctgaaataaaactgggctttatgcaggattctctttgaaaattcttgtatgtccagaacaaaagataaaactaattgtattcctcacattcacaatccccattggtctgaagtcacgtagcacagagcatctatagcacatagtgtttaaagactaatgaatgcaaaaagataaaatcttcaactaatttttgaattgtttctcatatatgctactagaaaatgccttgttgatgaagcacattttgggtagttgaggtcttttgttttcgcctttagctttctaagctttcttacaatgtggactgattactgtaacatttcacgtgtaaaataactggatattctttatatactggaaataacctgtgaatccaatatttcactaagtgttttaacttttgtgtatatatctctcatcaataaatgtggatttcaatt

SEQ ID NO: 1277 - protein, 569 aa, Homo sapiens
MASTEGANNMPKQVEVRMHDSHLGSEEPKHRHLGLRLCDKLGKNLLLTLTVFGVILGAVCGGLLRLASPIHPDVVMLIAFPGDILMRMLKMLILPLIISSLITGLSGLDAKASGRLGTRAMVYYMSTTIIAAVLGVILVLAIHPGNPKLKKQLGPGKKNDEVSSLDAFLDLIRNLFPENLVQACFQQIQTVTKKVLVAPPPDEEANATSAVVSLLNETVTEVPEETKMVIKKGLEFKDGMNVLGLIGFFIAFGIAMGKMGDQAKLMVDFFNILNEIVMKLVIMIMWYSPLGIACLICGKIIAIKDLEVVARQLGMYMVTVIIGLIIHGGIFLPLIYFVVTRKNPFSFFAGIFQAWITALGTASSAGTLPVTFRCLEENLGIDKRVTRFVLPVGATINMDGTALYEAVAAIFIAQMNGVVLDGGQIVTVSLTATLASVGAASIPSAGLVTMLLILTAVGLPTEDISLLVAVDWLLDRMRTSVNVVGDSFGAGIVYHLSKSELDTIDSQHRVHEDIEMTKTQSIYDDMKNHRESNSNQCVYAAHNSVIVDECKGPFVLRIKPAIGTDLTAL

SEQ ID NO: 1278 - DNA, 2595 bp, Homo sapiens
ctgccggatagtgctgaagaggagggggcgttccccagaccatggcatctacggaaggtgccaacaatatgcccaagcaggtggaagtgcgaatgcacgacagtcatcttggctcagaggaacccaagcaccggcacctgggcctgcgcctgtgtgacaagctggggaagaatctgctgctcaccctgacggtgtttggtgtcatcctgggagcagtgtgtggagggcttcttcgcttggcatctcccatccaccctgatgtggttatgttaatagccttcccaggggatatactcatgaggatgctaaaaatgctcattctccctctaatcatctccagcttaatcacagggttgtcaggcctggatgctaaggctagtggccgcttgggcacgagagccatggtgtattacatgtccacgaccatcattgctgcagtactgggggtcattctggtcttggctatccatccaggcaatcccaagctcaagaagcagctggggcctgggaagaagaatgatgaagtgtccagcctggatgccttcctggaccttattcgaaatctcttccctgaaaaccttgtccaagcctgctttcaacagattcaaacagtgacgaagaaagtcctggttgcaccaccgccggacgaggaggccaacgcaaccagcgctgttgtctctctgttgaacgagactgtgactgaggtgccggaggagactaagatggttatcaagaagggcctggagttcaaggatgggatgaacgtcttaggtctgatagggtttttcattgcttttggcatcgctatggggaagatgggagatcaggccaagctgatggtggatttcttcaacattttgaatgagattgtaatgaagttagtgatcatgatcatgtggtactctcccctgggtatcgcctgcctgatctgtggaaagatcattgcaatcaaggacttagaagtggttgctaggcaactggggatgtacatggtaacagtgatcataggcctcatcatccacgggggcatctttctccccttgatttactttgtagtgaccaggaaaaaccccttctccttttttgctggcattttccaagcttggatcactgccctgggcaccgcttccagtgctggaactttgcctgtcacctttcgttgcctggaagaaaatctggggattgataagcgtgtgactagattcgtccttcctgttggagcaaccattaacatggatggtacagccctttatgaagcggtagccgccatctttatagcccaaatgaatggtgttgtcctggatggaggacagattgtgactgtaagcctcacagccaccctggcaagcgtcggcgcggccagtatccccagtgccgggctggtcaccatgctcctcattctgacagccgtgggcctgccaacagaggacatcagcctgctggtggctgtggactggctgctggacaggatgagaacttcagtcaatgttgtgggtgactcttttggggctgggatagtctatcacctctccaagtctgagctggataccattgactcccagcatcgagtgcatgaagatattgaaatgaccaagactcaatccatttatgatgacatgaagaaccacagggaaagcaactctaatcaatgtgtctatgctgcacacaactctgtcatagtagatgaatgcaaggtaactctggcagccaatggaaagtcagccgactgcagtgttgaggaagaaccttggaaacgtgagaaataaggatatgagtctcagcaaattcttgaataaactccccagcgtatcctatggtaactgatgatataaacaagctttctttaaaaaggaaaaaaatgcgtatatttctatgtttacttaatctgttagccgaggcttagaggagctcttgtgagtcagtgatgacaggcacggtgctgtgtctttgccaaataatgctttataaccgtctaattttctcacttgtattattatttgaatggatgctgctggaggaatcagttggaattgaagacacgttcttgccagcttcccttttctcccaagatgcagaaatgtggatgctcttttcccaggggacatgagtaaagcagtgtggtacactccagggacttgggaaaatgagcaaacacacagcgtgttattccttaaagtgttctccatgtctcgccttgttatgcacaagagattctattaaaagcctctagaagtaactccccttaaaatgtctagtaaagcttgcacatggattgattaaaagcaaatacctgtcttagggaattctgacaatttatcttccatatgctctttaagtaaaatgtttcaaagacagttttaaagggagccatgctcttaaaggcagttgattaaagaacctgttacatctctgccttaccctgtgtaatctgtgagaacaatggttgaaatttcaaagtatgtttcattattctttctaaatttgataattgattaggaagtattttatatataaccactgtagatattgacaaaagtaagagagcacagtcaacataaagtttaaccagagttaaatattcaaatttatttatgt

SEQ ID NO: 1279 - protein, 574 aa, Homo sapiens
MASTEGANNMPKQVEVRMHDSHLGSEEPKHRHLGLRLCDKLGKNLLLTLTVFGVILGAVCGGLLRLASPIHPDVVMLIAFPGDILMRMLKMLILPLIISSLITGLSGLDAKASGRLGTRAMVYYMSTTIIAAVLGVILVLAIHPGNPKLKKQLGPGKKNDEVSSLDAFLDLIRNLFPENLVQACFQQIQTVTKKVLVAPPPDEEANATSAVVSLLNETVTEVPEETKMVIKKGLEFKDGMNVLGLIGFFIAFGIAMGKMGDQAKLMVDFFNILNEIVMKLVIMIMWYSPLGIACLICGKIIAIKDLEVVARQLGMYMVTVIIGLIIHGGIFLPLIYFVVTRKNPFSFFAGIFQAWITALGTASSAGTLPVTFRCLEENLGIDKRVTRFVLPVGATINMDGTALYEAVAAIFIAQMNGVVLDGGQIVTVSLTATLASVGAASIPSAGLVTMLLILTAVGLPTEDISLLVAVDWLLDRMRTSVNVVGDSFGAGIVYHLSKSELDTIDSQHRVHEDIEMTKTQSIYDDMKNHRESNSNQCVYAAHNSVIVDECKVTLAANGKSADCSVEEEPWKREK

SEQ ID NO: 1280 - DNA, 1526 bp, Homo sapiens
agacacggggcgtccggctaaggccggggacccagggtggtgggcggggtgtcccgcccgcctgtggaccccgcgcagtaactgcgaacatttcgctttcattttgggccgagctggaggcggcggggccgtcccggaacggctgcggccgggcaccccgggagttaatccgaaagcgccgcaagccccgcgggccggccgcaccgcacgtgtcaccgagaagctgatgtagagagagacacagaaggagacagaaagcaagagaccagagtcccgggaaagtcctgccgcgcctcgggacaattataaaaatgtggccccctgggtcagcctcccagccaccgccctcacctgccgcggccacaggtctgcatccagcggctcgccctgtgtccctgcagtgccggctcagcatgtgtccagcgcgcagcctcctccttgtggctaccctggtcctcctggaccacctcagtttggccagaaacctccccgtggccactccagacccaggaatgttcccatgccttcaccactcccaaaacctgctgagggccgtcagcaacatgctccagaaggccagacaaactctagaattttacccttgcacttctgaagagattgatcatgaagatatcacaaaagataaaaccagcacagtggaggcctgtttaccattggaattaaccaagaatgagagttgcctaaattccagagagacctctttcataactaatgggagttgcctggcctccagaaagacctcttttatgatggccctgtgccttagtagtatttatgaagacttgaagatgtaccaggtggagttcaagaccatgaatgcaaagcttctgatggatcctaagaggcagatctttctagatcaaaacatgctggcagttattgatgagctgatgcaggccctgaatttcaacagtgagactgtgccacaaaaatcctcccttgaagaaccggatttttataaaactaaaatcaagctctgcatacttcttcatgctttcagaattcgggcagtgactattgatagagtgatgagctatctgaatgcttcctaaaaagcgaggtccctccaaaccgttgtcatttttataaaactttgaaatgaggaaactttgataggatgtggattaagaactagggagggggaaagaaggatgggactattacatccacatgatacctctgatcaagtatttttgacatttactgtggataaattgtttttaagttttcatgaatgaattgctaagaagggaaaatatccatcctgaaggtgtttttcattcactttaatagaagggcaaatatttataagctatttctgtaccaaagtgtttgtggaaacaaacatgtaagcataacttattttaaaatatttatttatataacttggtaatcatgaaagcatctgagctaacttatatttatttatgttatatttattaaattatttatcaagtgtatttgaaaaatatttttaagtgttctaaaaataaaagtattgaatt

SEQ ID NO: 1281 - protein, 253 aa, Homo sapiens
MWPPGSASQPPPSPAAATGLHPAARPVSLQCRLSMCPARSLLLVATLVLLDHLSLARNLPVATPDPGMFPCLHHSQNLLRAVSNMLQKARQTLEFYPCTSEEIDHEDITKDKTSTVEACLPLELTKNESCLNSRETSFITNGSCLASRKTSFMMALCLSSIYEDLKMYQVEFKTMNAKLLMDPKRQIFLDQNMLAVIDELMQALNFNSETVPQKSSLEEPDFYKTKIKLCILLHAFRIRAVTIDRVMSYLNAS

SEQ ID NO: 1282 - DNA, 40545 bp, Mus musculus
  misc_feature (435)..(454): n = a, g, c, or t
  misc_feature (5796)..(6304): n = a, g, c, or t.
  misc_feature (8692)..(8987): n = a, g, c, or t
  misc_feature (18464)..(18526): n = a, g, c, or t
  misc_feature (26666)..(27403): n = a, g, c, or t
  misc_feature (29717)..(29995): n = a, g, c, or t.
  misc_feature (33859)..(33878): n = a, g, c, or t.
  misc_feature (40256)..(40275): n = a, g, c, or t.
ggagccaaacagccccttttctctacttacaagccaagcaggggcctccagtgttccattagagtgatggagacccaattaacctcacaggcagatgaggggtgggcacacctctcctgactgctggccagcactcttctcatgattccattaatccaaagacattttacagagagatgtttaggaagtataccaaatacaatagtttattgaccacatctccctttttcagtagccacactgaaaagcgccatgtttgtaattctaggaacaggtatcttgctggctttccctgaagcagagagtacccaaacaattagggtttctgatatagtcaaagcatcaatattgaatgagaaaaaaaaatgggacctagatatttcccctgcatgtcgctagatactaagacatgtcaaaaagagagagagggagggnnnnnnnnnnnnnnnnnnnnaaggaaggaaggaaggaaggaaggaaggaaggaaggaaggaaggaaggaagaaggatcctgtctaaatactgcaacgtggtggaatctgcgccattcttttgccaccaacagacctgacactgtgtgagttccacacagctcaaaattagcctcccttaaagaggctcactcaggctgtaaactgcctgtcacttaatcacttggaagaggatcttcaattcagaacccactccaaaacaggggtatatgctctaacaggatctgtcctgaacatgccaggatttccttaaaacatcccagaataacattatattccatacatcctcattctcaatatgcctttcagacttgactgtattctagtggccagggattagacaaagactactgcctctcagcagacagcaggtgaaaatgaataagaagactccagctgtcaaatgaggttaagagtctacaaactagtgagggagtgagaacatcggcaccgtttaagatctttatataaaagagagactacacagacgctgccgatgctgtgtggattggagtcccattttgtcagtgatggtaagggtgggtgatggtaagggtgggtgatggtaagggtgggtgatggtaagggtggtgcctacagagagctgaggagggatgtaaagatcccttattacagccagtggattctgtggatgagcaaactctgtcttggggtcacaaacgccaaccctaaggtcacaatagtagttgaggggacaccaggaagcagaataggagacctctgacttccaaggtagcgctgtctcacttacatgctgccgaggacaagtaccatgttctgatgacatgcaagctactaagactttctgccaggccagggagatggctcagtggttatgagcacagactgctcttccagaagacctgggttcaattccaagcacctacgtgatagcgcccaactatctgtaaccccagtttcaggacatccaacatggccacacagacaaacatgtgggcaaagcaccaagcacatgaaattaaaataaattttaaaaaatgtagtcttaatttaatctttaaacagggttggctgtgtctgtatgttgcaggatgagctattttaacctcaagtcacccctcaaaacaagaatggtacactaattaccatcctgtcagcttccaggacaagcagacactccgaaacacacagccactcaccaaaaaaccaggacgctcacagaatgaggggccaaagacacaggtcatctttaactagtctcaaaggactagttttcaatgtttgacatctcccatcctggtctctgctgtgcctctaacagattacaaattaagaacatgtttgcagagtggaattttaaaaccactgcataacccaggtaatagttcctggactcagtctaaagagaagacactgtatctccctggtacgagttactcaggtcagcacagtgtctccttctaaaccctttgacctacagactcattctggttcactctgggcattgtgcatgtcaggaaaaaaaaccactctatgaaacagctactctcatacccagactttattattttaaaataccactcattatctaatatgttaattctttcccacatgtaatcactagagaatgcactacttgactccaggagcccttctgtcaattcttttccttcatatcttccaacacatttactgactgtctatcagctatatgcccattatatcttaatataatatattaatatatatattatatccatagagctatccctgagttcagcttttagaaagatccagttttaatcaaataaatgaagtgcaaaagccagatgcatagaaatctctgccctgtcagctcatccattaacaccactcaaattctaccttacaagtccaaattaagccgccggcgagccctactgaatttgcacatagacctgtgatgttatcagcccagcacatatgcgatctctcagcatgaataaccctggcggatgctatgtaaaatttctacaacagactcctgaactcgggggcatatttgatgactgcccaaaacctcaggaggtccagccctaagcaagactgcatctaatctatggtccagatcaacgcttgtcttccgccaagtgaagcacacagtctgccaggcaaccttcagtgactggaggggaggtctaactctgtttctcaaggtaagtatggttttcgtctcaactgtaacaaatttcatgagtgttcctttcccgactcacttagagcctttgatagatgacataaaatctctggtgattatactacaaagagtaattatgtgaacgtttctcgtactgaagcaagtaaattggagccttattcaaaattctgccaaggaaattttaaattaaacacactagtctattctcaaaagaaaacagaagaatgtcttttcaggagggagtagggggcacaaaggtagttcttcttcagtttaccatgagacagtggggaccaggggctgcatctgacacaattaaaggtcctcagttgaatggtgtcagtgagaaccccacacatggtggcccgcagactccagcctcgatggaagtgtctgccatcgaaaaccattgtgttttgtggtttgtttttttttaaagattaagatttcagggtcctgaaacaattggtggccgtgggatgctaagtgtaagacatttcatgaggaacccctggcaaatcagcccaaaccctttgcctcacaacaccctttctgataccagggtagggcttgggtcctagtgtcggcatttccccattctactgactggctgctctcaagcaaacggaaacatacgtgggcatgatgaaggaacagggttctggaaataagtcaaagacattctcttactcatttaaaattctgtatgggttttctttctttcctttctcctcttcatctaggttgtgggtgacttaggtttcaaaaattgtcagaactgaatgttcttggtgctatgccctccaacaaaaacctaaccatatggtgataattttgaagcaaggaaggaagtgaaggcccctacatccaatcactgtgagaccgagactctctcctatcccttgtcaccatgactaccataactagcacacactggggcttgaagaagctgcctctacatgtcacaaagtcatctgacttacagccaataggaccacaatgaagagtgtgatctgaggcacttgagagcagagacatatttgaattttttatttttctgctctgatttcatccttcctacagagccttctgctccaggcttgtttgcacagcacatagacactgactgtcaaggtcatgcaaaggctgatgctctgacttaaaacggagccaagaggacatacattcctcataggggtccgagctagtgtgggcttagcttagcatacagtcacaaactgcacccttccaggatggttccagagcacagtttcttctccaaaggtgtacattttgaagaatgtaagactttgaaaacacccagcttcaaaatgcaaaactcaacctttcttgtttttaaatcctggttaaaaaaaaaaaaaaacaataccaagaaaataattttagaagtaaatttcaacctgcttctagaaaaaagggtttggaaaggctaaaagttcaagaagaaaatcatttttcctttaataccactgaattaattgcagaagggctggagagtgaatctggtatactgtgggattgtgggtaaactgtgctaacaaatgctgacagttcttatgcttaatgattgaaaaatatgatagaaaatagaaaatactgatgagaatgttttatacggctgcaatttggttgtagctgatatattgatacatagctcaataattacaataaaatagaaatgttcagtcacagagaaagtggatgttttttcagaggggaaaatgtctgcatttgaacaaaagtaagtatttagaaaacaaataaaatttaacttttgctttttaaaaaatctggtacgggtagtgttaaatgttttacagagagaatgtccacaatttaaagtgtcaaatgaagttgaagcaaaatttaaaggagacctgtcttttaggttcttaaacacttccttcagtacttttcttttaaaaatgtttaatactgtattctgtttttcttctttgtatacacaaaataaatgtttatcacattggtcacctgaaatgagccattcttcaataaaggtctcacacactgagcctcaaaagcaatttattgacatttttattaattataattccacccctgtcccagaagtcacaaaacaaagctgcttggatcagactagcaatcattaaacgaaaaagaactaaataataagttaaaaatagagaatgtgttcaaaggaagcaagaaagtgttgctcataatctctctgtcctcttcaaaatagacacctttccaagcctcacctcccattcaaactgaaaactccactacttttgaaacaaataattccacatcaagtccatttcaaaagaagcccctggctcctcccacaagcccctttacctcgctgaagttaagaaaaagtcagagcccggtggcatttttctccccagcacccactctgcagctccttcaatgtgagcatctactcgtcttaattaccgtgggcttaaaggaaactgacacattttagcccccatgcctccaaactgaaagattgaaaagattttgtccaatttcaggggaaacggaggtgcgtgggctcaccctgtagttttcaacccctgcagtctctctagaaggttctccacaagtacggatgccacgtgggtatccagtgagtgggcggggagtggccctgcactttcgctcatctctggtcttctcacaggagtgtttatagataggttagctggggtacagcaaaatccgtgggtgaaatgttcccatacatccccaggagcttgtgtgtcaccaccataagtaacgaattcagcgtatgtttagagtgtggggtgaggcagggacgaataggtcgcgcgtgaaaaaatcccgcgtgtgaatatacacacagaactcttttctcaaggagcaaaaaggtacaatttcgtcttcccgggtggagactggcttaggaattcccgggcggccctcgccaccagcaatcgcgatactgggacggatctctgggaccagaagaactggaccgcaaactaaagaaaccagccttttctggagcaaacggcgggtctccatgtcaaagtaaaaatatatatatataaatataaataagtgtgtagggagggggaaaccattggggnnnnnnnnnnnnnnnnnnnnnnnnnnnnnnnnnnnnnnnnnnnnnnnnnnnnnnnnnnnnnnnnnnnnnnnnnnnnnnnnnnnnnnnnnnnnnnnnnnnnnnnnnnnnnnnnnnnnnnnnnnnnnnnnnnnnnnnnnnnnnnnnnnnnnnnnnnnnnnnnnnnnnnnnnnnnnnnnnnnnnnnnnnnnnnnnnnnnnnnnnnnnnnnnnnnnnnnnnnnnnnnnnnnnnnnnnnnnnnnnnnnnnnnnnnnnnnnnnnnnnnnnnnnnnnnnnnnnnnnnnnnnnnnnnnnnnnnnnnnnnnnnnnnnnnnnnnnnnnnnnnnnnnnnnnnnnnnnnnnnnnnnnnnnnnnnnnnnnnnnnnnnnnnnnnnnnnnnnnnnnnnnnnnnnnnnnnnnnnnnnnnnnnnnnnnnnnnnnnnnnnnnnnnnnnnnnnnnnnnnnnnnnnnnnnnnnnnnnnnnnnnnnnnnnnnnnnnnnnnnnnnnnnnnnnnnnnnnnnnnnnnnnnnnnttgaatcagacaggaagacgggaagtttgggtctttaactttttttttttttttaatccaagggggagatgcgaggtgggtgagccgcctgcaggccctggcttctgaatccattcccagcttatcctctgccacgagggctctacctgggtccgcaccgacacccacccgagggtcgctacgatgcacaacctgggagattgggttcacaggtctgctgtcgggtggctcctgagtatgctttttgcactttaggccgcttggtcccggtgtgggagcctccagcctgggctcttcatttctcaactctgccccaccccctcccctttcttgcagtttaaaccgggttttcatgtcttcccccactaatctttctgagccttttcttccttaagcaaccatcgggtctgggaggtttgattgcctgaccacccatttgtccatgaagtaacacgaacagtgctctattcttccggggagccagggaagaggcgatgacccccagttcctggacggagatgtccctgctccgaggtgacgggatccgaaccagcagcacgccgggttggagcgtcctcagggtcacctggctggctggtatccgccaggtgagcttgttagaatgtgtgcctaggtggcaggttcctgcagaaatatgcctataaacacccaacacccggctgcaccttacacctacaggctttgtacactttccaaccgaaactgctaggcgcaagagggagggagacgggagggggcacgtcctggagggatggaagttcgggaaaactcgtatttggctgaagtttatcactctacctgggtcctacccagtaaaggatctttccaccttcgggggtttaaaaaaaaaagtagtggtggggagaaagagctcttattaatcctggcgccacccccgcagcagagcacactcgtgcttctgcacacccgagtccacacgcaaggaaataagtacacttgcccctaaggcataccggcttttcccatgtgctagctggcgcactttttatttaaaaaaagaagaaagaaaagaaagggaaaaaaagaaatgaagatttttcaacacgtggtcagagtggcaaccgacagagaaaacacagtcccagtcccaacctctccagggacgtgctgccaacctccgcaccctctcacgccgcaccccacgtgcggactcgcagcgacgttcaccttcgggaaccctcattagtaggagggggaggaggatgggggaagctgacgcagagggcctctcctgcaggacgcgctttaactttcccatctccagacagaggggcctccgtccagcgaccctcttcccccctcctccgcagccctcccagcctcaggccacctctcccacccccaagatcccctccccgctggaatttcactgcaaagccaagagtgggggatggaagaggcgaggggccctccgctggctctgggagaacctgccacccagactttatcctccgggtgggctagccccgacgacgaccacccgcctcttttccgcccccgagctccggatgctgtcttcactggagatgcggaggagactagccttcgagtgggtgtgggggaataaaaggatgccgccccccctacccccccccccgccgcccagcttctctgttgaggtagatgaatacctcagtacagctctgacgccccgtactttgtgcccctctgcaggagcagtgtcagatctgctccttggaggtggccctggggaaattttgagtaattgctttatggggtcataaagcataaattcatatatctgtgcaggataacaccgagacctctattcgggaaacccatcttgattaaaccccacaggtgatggacagagtgcactagacaagcgtcaccttgggcgcaggacggttccgtcttaagttcgcaacttgagtttttcaatgagttctcccccacccacctccgaaagctaatggcttccattgcaattacacattttcctcgcccgccccttccctcccctttctttacatgcagtagattggatactaattcccgctgccattgatagggtccgaggagcccaggcccctgtgcgggcctagcccgcccgggtccccgctctccctccgcccttcccgggcttccttttgatgtagcggagaaggcttcctactttaaaaaaaaaaagtaatctgcccggtaacaatcagcgcgcagtagcaggagccccagagctattggctatgcaaatagagggaggggagacggcgccccaaactcatactcacccttttaaagtgatatcccctccccccgcccaccccttccgccccaccctcgtttaaaggggctggcccagggctggagttaatcgcttgcacnnnnnnnnnnnnnnnnnnnnnnnnnnnnnnnnnnnnnnnnnnnnnnnnnnnnnnnnnnnnnnnnnnnnnnnnnnnnnnnnnnnnnnnnnnnnnnnnnnnnnnnnnnnnnnnnnnnnnnnnnnnnnnnnnnnnnnnnnnnnnnnnnnnnnnnnnnnnnnnnnnnnnnnnnnnnnnnnnnnnnnnnnnnnnnnnnnnnnnnnnnnnnnnnnnnnnnnnnnnnnnnnnnnnnnnnnnnnnnnnnnnnnnnnnnnnnnnnnnnnnnnnnnnnnnnnnnnnnnnnnnnnnnnnnnnnnnnnggtcggggattgaggggtgcaggactcaggagcccccggggaaaggaagggtggccttgctggcgcagggagagccaaacctaaaccctccctctccccctccctggcccctcccgagccatttcctagaaagctgtatcaatgtggccacgctccgcgcagacacctagggcggcttgtcagcagatgcaggggcgaggaagcgggtttttcctgcgtggccgaggcccgcggaggaaccgctgctagccctgcccccggtctggggccgctctgagaggctggccgcgttgcccaatggcgcccccaagaacagaaaggtttctgcaggagggtcatattctactaggcttaagaagcacccctttctccaacatccaccccttcctcctcttcctctccacgcacgtggctcggggcggacaacagcttgaaagttatcaggagtctaagcttgaggggcataacctttatccctggtttggcgaggttgcaattttctcaaataagcctttccttgttcctcatttaggggtctacttctaagttatctgaactcatccacatggtaaatctatctacctgaatcttgaataatgggctgtttttctgatcacattgcaagcctccgaagttagagagcacacacgtacacaccctttatgcccccatggtatgcctacagaatgtcagaaaggataatcaataggaatccatggggtttgtgggttcccctatccgaggcccctagcatgcggggctggatggggagagggcctcggagaagtagggagaggggttgggggtggggagcggggatcgtgtttgaagtttggtcaggccagctgctgtgctccttaataacaagagggaaggggggggggagagggagggaaagattgaaaggaggggagggacgctagaggaggggaggaaagggggaggaggaacatgagagggggaggagatctaactgcccttccagcttgcgtcactgcatgagcgagagaggagagcgagctgaggagagccgggcagttcggagggaaggaccggtgcgagtcaggcggcccttgaggctccgctcgcccaccttccactcttctctctctctctccctctctctctttgccatttctttcctctcccaaatctcccattcagccaaaggaaggaggtaagggaagcactccccgacccccccgcacctccaaaaaataataataataaaaaaaatttacagtcgggaccgagtggtggccggctggctatggagctgctgtgctgcgaggtggacccggtccgcagggccgtgccggaccgcaacctgctggaagaccgcgttctgcagaacctgttgaccatcgaggagcgctacctcccgcagtgttcctatttcaagtgcgtgcagaaggacatccaaccgtacatgcgcaggatggtggccacctggatgctagaggtaggtgtgcgggcgacgctctcagggagaggcaagcccagccgctccatccctacctccaacacgcagagatcctaaaaactgcgggagaactacccctgcgctggcctcccccgctcgtgcgcgaggtagccccgcacccttgggcgagacgctaattctgtcccttgctagattaactagtggaggaaaacttgggtgagtgaggatgtcctcccccccccggggggttggcatcccgcgcgtgtgcctgcatgtggcttcctcgtcttcccatctccatttctgacctgtggtgtggaagcaaccccggctgccttcagtgaggccccagagggtgttgcgacctaacaatccataccaacatataaagagcccccccccccgcccccgactctcagggttggggcaaaccgtctgagccttaggactccgcgttggcactttggcaggaggtgggggtgggggagaaacagggaattcaggagagccccggaagtcatactgaaaaaaacgtgcgtttagggcaatctgaaagaaccgctgctttagccttgcttgcaatctttgccgagagagcagggtgcccacgtatgcacagctctggacctgccgtggtttcgccatgttgctttgcaaactccatttacaaggactggcaacattcgccggcgcccccaccccctctcagcaccccatgatcctgggcaccctctttctgatcgtgccctcttccccagccctcggttcaccaaggttacttacagtttggctgcttcttgagcgcgcagatttgggtggggtaggaagcgggggaggaggtgtgtagagcaggctagggggcacccccaaatgagaggtcagagtcccgcatgcctcctggaggggggttccctggtttcgtctcacccaacccccagcaggcacagccttcctagctactgcccttgtgggccgcagccgaacactccgcaagtttcccccactgagatctagagcccctggggtggagataccgaccttacggacacccgaaacctcttttccagggagcctgggacctctctggggttttcaggcccacagagcgtttctaggattttccctcgatttttaataattttttgaaactgctcccccctgctccgactccaactgcggcggccggccgaggcgcgcttcctcctcctccctccccctctctcctccacccacccaccgaacagcggcccctggaccgccgagaccaccctggacatttttttcaattgtcgggaatggtagaataggatctgaggatccgaacgagaccaagaagtagactttcggagcttccagaatatttttattgattttttgaaaagatgacgaaatccaaaaaagagtgagttggtgtgctgagaagtgagccagagggaacggcaggcggcggcggctctgggctttgcctcggggtttgtggaggttttagttcatcacctttttcagctttgcgggaatacccgaaccccaggagcccttcggatttaccccaccgttctcatctctattcttactatcctttctactctcctccccctccccacacacacataaaaaattctttttgttatctcagattatgcttttatttttcttttccctctgtttctgatactaatttttccctatccccctcggaccctaccccactcttgattgtaggtctgtgaggaacaaaagtgtgaagaagaggtctttcctctggccatgaattacctggaccgtttcttggctggagtcccgactcctaagacccatcttcagctcctgggtgcagtgtgcatgttcctagcttccaagctgaaagagaccatcccgctgactgcggaaaagctgtgcatttacaccgacaactctgtgaagccccaggagctgctggtaatgccgccctccctgctcctgactctgcccttccccatcacactaaggccgccacactaaccaagactgtaagaaaaaaaaaaaaaagatgtcctttagtaggagagagctagtcttcccacatcaggtagtgagcaaagctatcagtgcctcatggaaattcatgagggtgaaattctgttgtgtgtgtgggtgggggggggggcataaatagaatattctagttaatgatgttataattaaggtccagatttccactgaaccctgagaacacggtctgatttctcacattctagtttgtgttgtttcccaagaccctggaggtgtaacaggtaatgtcttaaagaccaataaagtctcatggacaaacatagtagctgatcactaagtaccaacaaagcactaagtatgaacatattaacttggatgcaaaatcaacatctgcctttctattggtggatctgaagcatgagagttcagctccaaaaggcacagtgacctggatacagtccccagggggtcctgtcttggttttctcccaaccatctacctttttttttctcatgcacttccccctacccccatgttaatgccacacactgaaggttctgcagctctcttttacagtggtttgcacaccttgcactggtgaaagaagaccaccccctctatcgactccctcccccttgctgccattgcctgggcctgcttaatctcctgggcaaagactggcttcttgaactgagccctttgtgaggagccgtcctttctgggtctgtgctgccacctagtggcagacatgtgcaaggctgggggaggaattgcctagaacgcaaagaggggcctgaatgacttcacctttgaaacactgccagatttcagctgcttctggtttggtgtaagaggcccctaaaggtgctttcttctggaagatctgcttctttcaataatggtgccagaggacgagtttgtgctcacattgccctggaagaaggaagggtttgggattcaagccatttctgatttttacgtagttaaggaattttttttttttttatcctaacttcctgcaaaaaacccaggcagacttgaaagcttgtggggaggaaaaaaaaataagattagaattggaggccagcttgtctattcaaaaagaaaaaaacaaaacaaaacaaaacatgaaaaagaatcttctatgtgtctggtgtgctggaggactggaggtatttttcaagacaccctaatttttccaggaccggcaaagctaactcaattctccaaataaagtgtgccagcttcccatctcctcccatccataagttatgcaccctagaagaaccttcctattttacacgtgaggggagcttgctccaggaaacaccatagctggtccagctgacaggggctttatagccggtccccaagtttagcagatggagccaggtgaactgaagagtcagtcactgcccggcagtagtagcatcctgcgcttttgaatcctactgattgaccaggatcatttccttttgtttgcacccccccccccaacgaaaccaaaacaaacaaaaattgggacctttgcataatttcaagctagcctcaaacttctagccttaaagaggtagaatcccagacatgcacttccaggtgtgcatctctttggggtattattatatttagtccagttcatttgaacattattccccatgtttattttacaaaaggagaggcacaaagtagcctactagtggggtgcagtggagccccctaaaagagaccgttacagcccagtacatgggctgaccctgtttaagcacctccacattgccccaaatcatagtgtgcaaaatggagtcacaagtgaccacctcaggccctttagccatgaagacaaaggccagtgaagatttaggtgaaagggtgagtgtcatatcccaagacttcttcatggtgtgtcaaaggggaaggtgttggcagcagagagggaaaatgatactcttcccccacaaggaaaggccagcgaactggctgccaaggagttgggccaaggaggcttctgctattctgcatctgtaagcatcatttttttccatgaggagtaaagagacttagccaacaaattctcaccgcagcaccacagtggccttagctagatcttactataggcccacctttctgagtgggcaggcaagaacattttgtggagtcaggggtaggggtgaggtaggaagaaaactagagtaaaggctggtcttggcagtagttacctggcctctcattattttcagtggagcctgacttttttttagcccaagaagagccaggagcaacttcaaagcatgaggggcacagtgacagatgaggctgcagtggagccttaaggagcatcttcagagctggccgggaacccagcccccaacccgggcctggagtcagtctatggattcttagagctctgccctcttcctcccaccctttgcaggagtgggaactggtagtgttgggtaagctgaagtggaacctggccgcagtcacccctcacgacttcattgagcacatccttcgcaagctgccccagcaaaaggagaagctgtccctgatccgcaagcatgcgcagaccttcatcgctctgtgcgctaccggtgagagggggctcacggggcttccacggggccatgggaggtggggttgggtgtctaggcaagtctgagtaagccagcctggagcctcgctcgtgctttctcggaactagaacattttctctctctgcttcactcgtaagttctttatgagggcaagtatggtaaggggaagggagtcggtgcctgctaaaatattgtttatggtgtctaaagtgccctttgaagattatagatactgctctctggttgtgtttaaatctttaatcttttgaggaaaaggacggcttggagataagccctaaagggaatttaaggaaggtgggggcaaatataggttaaaggaccaacgacaagataaacatggtgcccgccctgataagggggaaggaattccttcaccgtggagctggtttattgccttcttgctgtttcctgttgacaagggagtgaacctttaagcaaagatccgtttattctgagctctggagaggatttttgatacatagctttattggcttcacacctgggtagaagaccctagcacaacatttctcaacctgtgggtcgatacatcccacagggcttacgtatcagatatcctgcatatcagatatcctgcatatcatatatctacataagaaatcacaaatagcaaaattacagttacaaagtagcaacggaatggttttatggttgggggtcaccacggtatgaggaactgtattaacgggtcacagcgttaggaaggttgaggttgagaagcgctgccctagaaccttgggaattcgggggccaagtgtcaaaagttcatctcctcagggttagcaggtaaagaaagaattgatcatgagtggggtgcagctcaattcatccagggttgttgaaatgtgttgatgtgatagggggtggggggaggtggagtgtaacattttaattccttgtaacatttaattatgtgtttgtatagctgatgctataatgaacaatagggcctgtgctttgttggaagttcagaggtcaggcagacttcgttacttagcactgagtgacctcgctcaggctgtttgacctctctgaagttcatctgggatctgcaaaacaggcctttggatgtatccttccctagccttggtggagtgggcagggaaactgacccacagaaaagcaagcctggagcttcctgcgaaagttcactgatgttgagaatggctccagttaaggtggatgcggaaatggatacagcctctcactggcgtgccggattccatctccctgttttagaggggtgtgtgtgtgtgtgtgtgtgtgtgtgtgtgtgtgtgtgtgtgtgtcacgcacacgcgagtgcgtgcacgcactcagtttgcgttggtccagcagccctcggggccctgcatcaggccttgtagcacacttgtggtgtcccagctccttcgtggagtcccctgctgttcctacagtcagggaagaggatgacaataagaagccccagcctttgctacgctttggacagcactttcagctccctgctcttctcttgctgactggcctgggctctagaggtcagtcccacactgacctgcagttttgtttcctaggaactgtctctttcctcttgcagtgattcagggtgggggaagggtcagtcagccttttctctctggccctaggacacctaaccccccggactcataaattcccacatcacccagctgccagtggccagagtcctgctttgaccttatcttttgaccaacaggtcttggggggtggggggaggctttcacttcttcctccctgatcttgcactggggtgggggtagggcgataggtggaattactcgggcttggatggattcctccaattctgtatagaccacaggtccgttctgtgttcttggggatcccatcccccattcttggccatcttgtccaaatccttggggcagctgccaactttggggcccaaatatggagcctgggattcagtgactaggggcagaggcccagtgggaggtaggggcagtcagaaagatgggcctgttgggggccttgacctagctttagccaaagagtgggaaggggtcagaaccatgtgccaagtactgctccagaggcatggactgatgagaaagtggcggaggtgctcaggcctcctggggctggaatgggtgggcctgaccacaaagcccccatgtctcttctggtctgcatttggggtcctgcatgtgaataagctttggagccctgccggtatgtgggtgtggaagggtggtggaggggagtgttggggccagcagacaggcagtaggctggacagcctaaacccagaggcctgctgctcttgaggacgttgagcttctggggccaagatctagcgaacccaagttcactagcacccttgaataatagtaggctcagagcaactcaaggaccaaagatgggagggtgctcttgtgtgccccatcacctcacaccctcagtctcttaactccagtcctgaatattccaccctgaacctgaggatggcccagggttttgagggttcacaaaggcgtgggaagggggcagtccctgaagaggtggtaggtagccagccctggggagacgttgctagtttaagggaaaagccaattgtgaaagagctggcagtccctccgagggggcgtgctgagcgtatgtgtgtgtgaaaggggaagagagcgtgggcagtccgggggcccagggagggaagagtgtggccgaccagcagtcttcctttatggggttctggggtaaggttggtggcagggcaaagaggtgtgtcctcctttccgatccagcctacagtggtttctgagagagaggtggtctgggattgcctggagctgctctccccgctggcctttgtggtggaggaattttaggtggggtgagagtgtaactgcagctccagcccagaacgtgtggctctggagaaggcagaagtggacttctctctcctggagggctccaggtcagcaaacagggcaaaaagcaccccctcccccctgggggtaaccaggaggctaccatcaaccttaccatactgagcacatgatttcagtggtattgagtttaaacttggtacagataccccacacctgcctctttttgcattgggagtattgctgtggctgctggacccaactccctgtgtaaccctaaggtagggtaggaatcctagggtacagccagtcttctcttaaaggtgttcatttgatttccagacagtggtggccctgaaaagtctggggacttgactcttgttctagaatgtaagccaagcctctctggtggccaggaaggaagaatgagacccacatttccacagtgcctctgagctgcccctagagggcagtcatagggctgggcgggggggggggggggaagagtagcttgtcgagctgaagtttctgtaactgatatcgnnnnnnnnnnnnnnnnnnnnnnnnnnnnnnnnnnnnnnnnnnnnnnnnnnnnnnnnnnnnnnntcgccattaatagttattgccttaaaccataaaggataggttgtgctgaacccttctggggggtgtcagatgtatggatgctaagtgacatcatgggtgtcctttgctgtccaaagagcaccccgggtctgtctggttcttgaaacctgcacctcaccacaggttgaaggagaggaagaagccgagacatcagacttgttggttgggtttcctccatcacaaaccgatctccctccccctagtggacaacaagagtaaagcagcctccgggagccttttgttagcactactcctggctcctgcttttactccatattaataagctcattgggcaggaccacagcatcccacttttaaatcccatcagtgtagaacagtttggccagtgaaatctcatggtttttttttaaagtgcagattccaagttggtggttatagagtgcttctcctgattcgggagccaccccagacacccagctgcttctgtggagtcctggatatttggtaccacgaggaggtggcagatgaatctagggcccatgtggttggcttctgggcaggagcccttttatgtttcctttcgtggcatgtaggagaaaacgttgagggttactctaagcacagactggattggggtctctttaatcagaggtccagcacccctagtgagtgagcagtggcactgagcagtcgtctgacaccccaagattcccatcctctgtactgggtcctttgcctgctcccaccaggagggagaaggtcaggcctgaggctcctcataggagcttccaggctctgggtgaaccacaccagagtcaatgtggactggtggcaagcagggtgagggttgggagcgtgggtgaccgatgtctggcatctaaggtttaccctgagccaggttctatgcgtgagttaatagcatcggctcttgtaactaatcctcaggatagcacggtgggaaaaaaaaaggtaaattagtacttttgatgttgtttttcaagatagggtttctctgtatagccctggctgtcctggaactcactctgtagaccaggctggtcttgaactctgagatcttcctgcttctgccccctgagtgccactaccacccagcaaatttgtaggtcagaaaaattcctttcaaagatacccatagagtgtaaatgaagccaagtatgacacaccaaactgggttgtactgctgggtagtaaactggctacccagccataagaaactgctacttcttgggagcacctgtttttccactggggaaggagtagatgtgcgtactggagcatggaataaagagccagtcagactctgcccaagaaggacttctttcagtacttaataagggaagaggtaaataccccctccccggcctgacacctgcaccccaggtcaagccgcacaccccttctggctccacatgctaaccctgagttggttttgttagcagtgtgacttcaaagttctgcaggaatgttgggtgaactccctatctgatgccccagcacgagggagggaactcttgagagcacttcagtgccctgtcactgacaggtgctctcacccagggcctctgtgggcccagggccatgggctggctacctcatctacactatgaatgccacacacagcagctaacaagtttattagatagagaatgtctcctgtaacccatatcggggagacttacaacacatcaagagccagggagggaggttggcttcatcacatcagccaggatagagaagacataggcaggggtcagcagccagaaggagttgggtgaaatcccatagtatatggccctcaaagtgaaagtgatgagcggtggaaggaacaaagccaaggagacagacagatggccaggcctacctggctcctgggattgagcccaggtgagcaggggagtgtgtgtggttcgctgatttgtggggtgtctaagaacagtcgaatcacgatgctgaggtacaatgctgaggtactggctctctctccattgtaaaagcctctctgtgatgctctgctgcaagagggcattgcccgaagagaggggaagagtccaggttgctctgagcgtgccgtgttcagcccaggattctcactctgagctgatgtgtgactcatgtgtccctctgtgctctgccttcagtctccactggacttactggtgtcttggtacaactagagatcattcactggaaagtggaccccatttcacagctgccactcgatggtgacactgtcaactccttaatctgtgagccccaaggcaggggcaaagacaagatcaacttgacagttcccaggtttcattccatccacaacgtcaccctccatggtggctttgtgtgttaaacagatatcacacgcaatgcatgcatgttagcagttggcaggattctcctctgcattgaaaccagcagttcatggatcacagttccatggatccccttagagaatcactcagcggtgaatgagtttaaggtcccaggttgcccctactatttaaggtgaatcccctgtcttaactcttagaaaaatacaagtgtggttagaatttgttagtctttagtgtttgagaaaagccctgtcctcggccctaacgttctgaagatccttaaaatagggttaaaagttgagactcaagagaattaagccaactcaccttattctgcttctacatttagcttacatgcacacacatgcaaaatgcacgtatgtatgcataccatatgcctgatgactgtggagaccggaagaaggtatcagatgccttgagatcggagttgtagacagttcatgtgaatgctgaaaatcaaacctgggtcctctgaggatggaataagtactctagccactgagtcaactcctcagccatggaagataacatgttttaatcatctcactaaaaggttccaggcatgtgttgacttcttgagtagttgtctgggcacagagtgtctgggactcagagccccggatgactagctgtgtactcagataggcaccctttctctcctgcctctgtgtctttgagaatatctacagttgacaagtcaataagggcttcctgtggaaggagggagtcaagggagacagtggctgtggatccaggggttctaggggcagcaggtctgcgccttccagcttctgcgcatcagctgtctggcgagcactgggccccgttttccttctgggcctgactttaagtttctggttctttgcagacttcaagtttgccatgtacccgccatcgatgattgcaactggaagcgtgggagcagccatctgtgggcttcagcaggatgatgaagtgaacacactcacgtgtgatgccctgactgagctgctggccaagatcacccacactgatgtggtaggtaccagctcttttggctgagtccccttggctgaaacccgatgtctctcctcaagttccaggaaggatggttggtttatgatggtggctcagagtctttttgtttgcgttactgttttcttggtatcttgtctttaaaggtcaaactccagcagattgatgccttccctcgaggtgtgtgtgtgtgtgtgtgtgtgtgtgttactaggggttgggttctcggtatcccaggcaaccactgtaccattgagttacatcatcagcccttaagggtttgttttgttttgtttttagatttatttatcttatgtctgtgcgtacactgtcactatcttcagatgcaccagaagagggcatctgttcccatcacagatggtggtgagccaccatgtggttgctgggatttgaactcaggacctcagggagtgctcttaatcagtgcttttaatctctagccctccttctctaaattttattgagagacaatctcacaaagatgccttgaattcatgatcctcctgcctccgcttccctatagctgggattacaggtgtgcacaaagactgcctgcttcctcttatgggtttgaaagcgtgcatgtaccttaaaatacagacagaatctcagcaagctgatggggggggtgggcagtcaactgattttcctctgcagtgtagggttcatgtccatttatgttcacgttgtcaggcctctgctctgccatggagagagtccaggtctactcactccccaatgaggtgggaatgcacaaagaggggacagctaaagctgtgacagagggagcagatttgagaggtggccttgtgagtgatatctctgccagtcagccttcttgccatcctgtctcgggctttcttttaactcaaagtttttggtggatggcaaagcacacaaggatcgagtgcagtagaaattcgagaactattattagctttagtctttttccattctgtgtggatggccccgaggctgctgctggctgccagaattcagagatcttaaacacagaggttttgagatggaccaggatcgcacaaggtcctgatttcactggctaggatgtaacagttgaagagggttctatctgggataactctcagagctcagttacctgcatccctcctccccgcagcccccccctccccccccaggcagcagagaaaggatgcagcagagaggcaggacaggtaacagcagagccagtacccaagcctctgagctctgtctccagcctggaaactttgctcatctctgtggctcttgggagctttgtattttgcaaaaggcattcagtggaaaggctaagcagagaggggagtattgttggctcttaggttctggtgtttcaccatggagaggcttggcttgggaatgcaggggagattcacaagataccctctggatatgcaggggcattcagactgccccatgagggagtttactgggttcaagggtcacgccgtgtaatgcacaggcctggggctggtgcctcgcagaagtctgcaaagcacaggctgtttaaactcaggaagctcacagccatccagcaactcacctgtatttggccttgacactacctcagagaggtgaaggccttaaaggccttgatagagctaaaccatgggtctttctttctctgaaccgggttttaaacagagtatttgaagtgttggtgccaaaaagcatgctttttagccaggactctaggacatggattgtgaggctccccacctccacccgcagcacagcatggagaatgtgtttctgactctccaacgtgtgtgtgtgtgtgtgtgtgtgtgtgtgtgtgtgtgtaggggctcaacccaggccctaatcttcacttttcctaatgtgtcctgctaaggattacttcatagataggatgttagccagtaacaaacttttcttcaacttctgaacatgcacacgcacacatagacacacatgatgctgtgaaggttctgtgccccagtataggggattgccagggccaggaagcgggagtgggtgtgttggtgagcaggggaggggagaagggatgtggggttttcagaggggaaactaggaaaggggataacatttgaaatgtaaataaagaaaatatctgggctggtgagatggctcagcaggtaagagtactgactgctcttccaaaggtcctgagttcaaatcccagcgaccacatggtggctcacaaccacccttaatgagatctgatgccctcttctggtgcatctgaagacagctacagtgtacttatgtataataataaataaatcttaaaaaaagaaatgaaaatatctaataaaaacacaaaaagacacatgtagaaacacacgtacacacatatatacacatacatacaaacatatatacacacagacacacacaatgcccacgaagacagtaagggctggagatagttcagtgattaaaagctccgactgctcttctagcacctgggtatgattcccagaacctacgtggcagctcccagtgatctgtacctcacacatgtggtgcacgcatacgtgcagacaaagcaccaatacacataaaaacagattaattaaaattcaataaggaaaagaaaagtgtgcaggggcgggggtcctcacaaatgctagcgtgaggcactttaagagaggcagggcatgtctgcaaatgaacttaggatgcctaatgcaaaatttgagcagagtaaaaaaattgcaaaatatgtctttgggctaagagaaacaaaatgtggtatggccacatgatgggatgtcagaaagccttccaaaagaaatgtcatcctatagacactaagtgcacggttaagcttgaagacattgtgctaagtgaaataagccagacgcaaaagagaagtcatagatgaagcagctagagaggtcaaattcatagaaacaaaaaacggaaggaaagttggtcaaaaggttggaaggaaggcaggaaggaagaaaggaaggaaggaaggaaaacaggtaggtagggaagtggaacatcctagccataacatacagtatgaatgtacattgcaccaaaatgcaccaaaaatgatcaattttatgccatagtatctttttttttaatttatttatatgtacagtgttctgcctacatgcatgcctacaggccagaagaaggcaccagatcctgttccagatagttatgagccaccacgtggttgctgggaattgaactcacgcctcctggaagagcaaccagtgctcttaacttctaaagcatctctccagcccctatgccatgatattttattcatataaatataccacactcatacagatcatccctgtgaaatgccagttagtgtgttgctctgtcatgtggagaagttaaaccaatccaaatagaagccaggagccactgatagctgactgccattcctgagtgcccacccccccgccccgagttctactctcacggctggcccgaggtcaaggttgaaagttggtcccctggactccccagccatagctagacagcatctcccagctcactggcagctgatagctggggctgcagggacccacgcggctctgagaaacgggctttgttttccatatggttgccaaaatcaattgactagctccattccgaagagaagtctgagcgagaagcctgacagtcttacagggacagaggggagtctcagaggacagtgtattttaggtccttttcccttccagccacaagttaagagttactaaaatcagacactagccagggaggcctgcttggctctcagggaacttctacatacccagacttctgttgccaagagggagtttgagagcagggcttgaccatcccaggcccccacagaatcctgttccctttccatcccctccacagtgtaatcttgctgtggttcagagtttacctcactgttcacttgactgtagggcctcttgtataagacctaccttgaacttggctttttatcccaagcctccagcagtcattagaaactaaggcttggagcaagggagggaaggatggaaggacgaaaggcagacagggctttcaaatgtgcctctcattcattcaggaccttaggaaagatttatcatctgtctgtatctacctgtctatctacatgtacaaacttaaacagaagatttatcttggagcaacctcttaatttcactgtcagtcacacacttaagtcaatatagagtagagctggtatgaggctcagtggtagaatatttgcctaacgcgtgcaaggttcaatccccaatagttcaagacagggaaaaaaaaagttgaactgaggcgtccatgctataaagatttgaggaagtttctagaagatatataatagaacaaacagaggctctagtaatactgtcagttctgcctcggttataacaggaccccttgccgtgttctccagaactgcctagaatagattctagaatattcttcccttagggtcatcttggcattttatgatacaacttctcagcgagtaattacaaaacaaataacttaagtaagcattgctcactttggacccaaacttttctggggagagggggtccccatcatctcttatgtcccccgccccccttggcttgaaacttgtattctcaaagtgcctctgactaataccaccttcagtgtgcttaaggggggcttcggggaggtaggaattctggaaagcatgcctgggggtggggaggcgggtagagctgggnnnnnnnnnnnnnnnnnnnnnnnnnnnnnnnnnnnnnnnnnnnnnnnnnnnnnnnnnnnnnnnnnnnnnnnnnnnnnnnnnnnnnnnnnnnnnnnnnnnnnnnnnnnnnnnnnnnnnnnnnnnnnnnnnnnnnnnnnnnnnnnnnnnnnnnnnnnnnnnnnnnnnnnnnnnnnnnnnnnnnnnnnnnnnnnnnnnnnnnnnnnnnnnnnnnnnnnnnnnnnnnnnnnnnnnnnnnnnnnnnnnnnnnnnnnnnnnnnnnnnnnnnnnnnnnnnnnnnnnnnnnnnnnnnnnnnnnnnnnnnnnnnnnnnnnnnnnnnnnnnnnnnnnnnnnnnnnnnnnnnnnnnnnnnnnnnnnnnnnnnnnnnnnnnnnnnnnnnnnnnnnnnnnnnnnnnnnnnnnnnnnnnnnnnnnnnnnnnnnnnnnnnnnnnnnnnnnnnnnnnnnnnnnnnnnnnnnnnnnnnnnnnnnnnnnnnnnnnnnnnnnnnnnnnnnnnnnnnnnnnnnnnnnnnnnnnnnnnnnnnnnnnnnnnnnnnnnnnnnnnnnnnnnnnnnnnnnnnnnnnnnnnnnnnnnnnnnnnnnnnnnnnnnnnnnnnnnnnnnnnnnnnnnnnnnnnnnnnnnnnnnnnnnnnnnnnnnnnnnnnnnnnnnnnnnnnnnnnnnnnnnnnnnnnnnnnnnnnnnnnnnnnnnnnnnnnnnnnnnnnnnnnnnnnnnnnnnnnnnnnnnnnnnnnnnnnnnnnnatggctccaagaggggctcctgcaaagctggggcggttgtaactgttgggattgattgatggatgattgatcggtggatgattgattgattgattgattgatgattgatggatgttggaggaataccatgtaggtctctccaccctcaggaaggaatatgttctacacttcctgcagatagaggatttctacctggccgagccaggactgagggacccttgttgaaggtagagctaataactgaccacttatgaggaagtggaagctgatagacagcagttaagcagacctgatgggtttagcagtctcccaggtgaatggcagatgactctgtagccatgtttcgtaggctaactgcatcagtccttgttcctctctccaaatgagagggagcaaagatcagggatcatccagtcagtaatgatttgaatttcagttaacactgggaagggagagcatagagtttacatgaaacctttggatcttcctccagtgcttagactacttggtgagcatacccttggctggaccattacatcatgcttgcatcatcttgagctcttggctctgaacgtgcagtagaaatgactgccagatgtcttgtcttccctgtaggggtttctcccaactatccctttaaaatcttgggcagctagaagggaaggcttactgtaggaagagtagggacactgcagatcctaacgccaagttcttaagctttctgcaggctgatttatgaagaccatctggcatcattaatacaatagagatgtacaagggtcgtgatgacggggtagatgtgccaacccagatgatcttttccgggaatcagaagatagcggactagtttaaaaaaaaaaaaaaaagggttgtatggacttggccaagaggcacaaaacttcctactgtagagcagagtctcccgtgtacattacatcagaaaatattcaccaagtaaccccacacacacacacacacaccgtaaagattcctcatcatttatagaaggtctcactctgcagcccaggctgtcttcagaggcataatcctccagccttctcctcagccagcttcctttcaaatggagtggttccgagttctcctctcaagccccaccacatagacccagcctcacgaaggatccctcatcagctacaaatcctactgttgtaaaataccagaagcttccaggcctcaggtaggatttgatttctgaggccaggtacatgattggaggcatggatgtggttgctgtctctggtattggggtgttcccactcattctctctgccttccaggaaaaagctatttacacatcaccaaatgctgccagattggcctagcaggaaacatggcaaacaaatgagaagctgtcaggacctgagtttttaattgctaatgagggtggcaggtcccaaggatcaggatgagagatgttagagcctgggcacatgagtcctttacttggtcctgttaaaattagcctggtgacccggtgacccccgcccccaatgctggaccacactatctctaggattaaccttcgacacatccttgtcttaagtagttggtgatctatacctttgttcacagaaatataggatgggcgtgtttgtgtacttaaagtttcaactactcagccagcctgagaaacatgagtctcaaaatccaaaggattctttcagattcctggacagatggagccactaaaacacacacacacacacacacacaccaatcatttattgatttgctacttagctcttcatttttatacttggagaaaccggggtttgcaaatggagctgtgccctgccagcaccgagtgagcaccagacatccccatcctgcttcccgcccttcccaggttcaggagaacgtttcagccaatgaccttcgctcttgatctgctgccatgcctcatcttcaagctacagtttgaactggggggcagatgagagatgggaaagaataaaaatggaggtgtcatgtggggggggggatgaggagcagtagggtgggcgggggtagaggatgcaaacttttgctccttagtagttattgccaactttattttcaggtctctggaaaataaagataatgcctttatgtttgtggaaaaaaaatatcaattcctaggtggtgaggtctaagcagaaaaataaacagagggaagtttatggtgaactgtgagcagataccaggagattcgagttagcaccgtttctatacgcacaggatgcttcctagtgcagggaggtgggacggagaaactagggtgaaaatccctggtaggggcccccctccccccaannnnnnnnnnnnnnnnnnnnnnnnnnnnnnnnnnnnnnnnnnnnnnnnnnnnnnnnnnnnnnnnnnnnnnnnnnnnnnnnnnnnnnnnnnnnnnnnnnnnnnnnnnnnnnnnnnnnnnnnnnnnnnnnnnnnnnnnnnnnnnnnnnnnnnnnnnnnnnnnnnnnnnnnnnnnnnnnnnnnnnnnnnnnnnnnnnnnnnnnnnnnnnnnnnnnnnnnnnnnnnnnnnnnnnnnnnnnnnnnnnnnnnnnnnnnnnnnnnnnnnnnnnnnnnnnnnnnnnntcaatgcagtttggaataggaaacacttaaggcgtccgctgatgcgctggttctgaccagcttgatctgggataggctgctagctagttcccagatggtgctgatgctgcctgctgtggccccccactttgtatactgagtagtttccatggcatttgagaacatttctattcttacctcacaggaaaatcaggatgtgagttggatcgcgcgtctgcctttgagaggcgttctatgcatttgcatgtgctaatagccccggtctggacctctctcctctaggattgtctcaaagcctgccaggagcaaatcgaagctctgctgctgaacagcctgcagcagttccgtcaagagcagcataacgccggatccaagtctgtggaagatccggaccaagccaccacccctacagacgtgcgggatgttgacctgtgaggaagccattcgggcggcaagagagaggcgtgttcgtcatctgctagccccttctctctctagttatgtcttgttctttgtgtttttaggatgaaacttcaaaaaagaaaaaaaaaaaacaaaaaacaaaaacaaaatctgcccccacctagatcctatttaaaggtcttttagaagtgagaggaaaaggccgtatagttgtaacgcatgtggtgcctgttcaaagtcctgcataaggggatccctgtacactcgaaccgttattatttgatgatgtaaaagtcatagtgagatgcttacaggagaacccgcagactagctagagagtgtgcgtacctgcaacatgggaacgaattagaggagactgtcttttgtgcttgtgacctagtgcatatgccccctttagtagaattgcaaggaaccgtgggtgccaggaccgcatgagtagtttgcaaagcagtgaacccaaggaggaatcagaaacgagaagggacatgccggggaggttgcgcaaaaccacccaaccacatgactgaaccattttggatgtaagaagcgccttgatgcctcaccacgtgttcccaagactgagcgtccgggtctctccgtcgcatactcttgctgactaaagtagctgctacctaagggatatgtcttttgccagttggacacaggtgaacggctcctaagtctcatgtttggtgaatttgggcttctacttccaaacatggttcattgtagatgtattttactgttatctgatggagggaattcgctatgggccatgaccaaaacgcatctaaatgggggcagatggagaccatagacggaatctaaaacaaagctgccttgtgtaagggaagagggtgaggtgatctttaattcccttgttaagaaaaagaaaaaagaaaccacccctaacttttggtgctgattagcatgtctggtccactgtttaactttgttataaaccattccattagaaaagcactttgaaaattttgggggagggtggggtgggatatggggatggtttatgcaaatcatgttgaatacgccttcctcctttgcccctccccttcctgaccctcgtccagttactgttcatttctggagtctgatgttctggtacccagctctggtgtccctgccagggctgagaaagccctctgctgatatcctcatcccagcattcttcggaaaacctgtcaacagaggtctaaagcattgtgatggcttagaaggattgaatccccgtctatgtttttctcctttggacatggaaagaaaggttacttctgatgcacaggctgaacatcagggtgtggcattttggtcccttttccgttttttgtttgtttgtttgtttgtaattttagtgcaaagttgtattcattgtacttgaagacccccctctcccacttcttggagacagtcagtaaacagaagtgggagccacagttggtttggttttgttttgttttttttgtttttttttttttttgcacaattataattgacaggttatgaagctatttgttaaaatatctgctttgtttttttttttttttgagaaaagatcagaacagggctgctttgaagagttatacacaggttctgccttgtttcacagtgtgagggttgaagatggagaaacatctaagggtctcttatctttcattttttcttttgttctgtttattattattatttttcgctgctaagaagctaagatcgttcacccccattcacattaacagtacctagctgtaatgtttcacggtgtgctgctattttagaaacattgttataatatattattttactgcttaaatttcaagtcccgaggtagatggtcgagagacgagttctctgtactggaaaagccttttcctctgtccctgtccttctggtagcatcgatgggctgcgttgcgtttggttccgtttggttccttttcttccgtgcctcttcattaccaggttttctttcctcctctgaccacattcttcaaagagagtattctttacctcaggtttactggacaaaaacaaaacaaaacaaaaccaatagtgataacaatgtacttcttttcgttttcctaatacctcacagctataccggatctgtttggaaggccgctggcacgaggcacagggcaggcagaagacaggaactggacatcctccttgatagaaagcaggagaaacctgaccccagagtctcaggccaggggtcttctctgtcttgaagattgccaggctcccctttgacgcaggctcccttcttatgatagaagacagtgacgaagggctcctctacccaaggcagatactcatcaaacacagacagtggactaggtcagcctgatttgcatgcgtgcaccagggtctgcaatgaagaattctggcagacagttaggagaccctccctccatcttgtagcccattcagacacaggactttcctcttcatggggtcccttcatcatgaacattgaccagtttccttcttggcatctataccccaacttcggatggcctccgaagtcttcctaggactgagtctggttggtgctgagtctacagcacacgtggatgatattcctttctccttctcttgtcctctgcagtctacagtgacaggcaagtgctgtgcgtggccaggttgtctgtgtgtagcattgaatggcttcagggtttggatcccgttgagtggggcaaggtaggaggcccaagttgaatgagtctggaatgcaagttgaaagaagggagaggctgtttctgtggtctcgggtgtatttaggaaggattgggacttggtgagttagcgagaccctaaattctaggggctttgtggtaggacggtgggtgatggtttgggaagtttgagagagaaaacgggagcagcctgcagctagccagtgtttatccagagctcacgcactgcacagcacactcttctggtccttaagggaccccacagaacttgacagacacactcccttgagttcttgggcaacttgggtacctgatgagtggcctttgagcttaactgaaacattgaatgaaggaagctgacacacaaggggagaggcaggttactatctgcccctccatccctcttacctggaacctaagacactcttcctgtttgccttccttggagcctagtggaacgagtcctgtagagtggccattctgcctgctcctcacttacacaaaggaagggagcctggattccttggtgaccaataccttctgcttagatgtgggtctccttggtagtatttctgtctcagaggggtataaacgaccccaaggatttcagcttgctctccccaagccccttcgtatcctacagaaggggttgcagattctggtctttttctgccttgctaatgatctcttctttgtttctaatttgtcannnnnnnnnnnnnnnnnnnntgggggctaagtcgttcccccagcctgccaaattttgatccttcccctgttttgaccaaaatcctaaggggaaagaaaaccttagtatgccaaaaataatatgctaagcataaggagattcataatggttcctaagaaccaggcagcctgtgagtggtgagctgcttctagatgggacagcttgtagaggctgctttggtttgaactgtccccaggacaccacgggaaagcagagcccgtcatataggttgctagctttaaggtgcatgcctactgacacgggactcctctctagcagccaggctgggggtacatgtagcacccctggatcccatcttgttgctagcagggtaagtgacccctcagagggagcttaagagctttcctatagtctagctctttggggacccaccagactgtgccttgggaattataggagcaacaggctaagacagggtggctttcacaaagaaggcagaggagctttgtctccatgaggacagggctgggaggaccacacttgtccctgtgtcctggacagtggtgtgggaactggaggtagcaatcagaagtctaagtaagccagctgacctctaagcccaaaggactcccccttgcttaccttagacagtccaaccttgggaatagctttaaaaaggggaattaatactgagacagtgaagtccccttaagccgacaagccctccataggtgcacaccgcacacataggcttctctcagtgcagactccaggtggtggtcaacagctgcggcatgcttatctatttgtacgaaatagtgtagggaagccccaggaggtgttatagcttccgtataccatgtggcttttgatgcttctggattctcaacagcacaaaagagtcctcgagccggaacatgcgctactccgcttttaaacgtggctgggctgtgagacccgttcttggctctggttttacgaagccatcaatacatacacacccttgatggagctgcagatccgttccttttcctgcagcccacttgtgggggaaaagtgccttactgacttacagtagccactcagtttcaacaggtgcctatctttgacaaaaaaaaaaccacaaaaaacaaaaaaaaacaaaaaaaaaaacagaaaagaaaaaaaacgttaaaatgtctcttaattttcattggctgttattcttatattgatcatcttgtatgttcccagcaagtcaccgggccatcgaattatctccatgttgttgttcattatccttctgccatgtacctcagatctatcagttatggtctctcttgtcttggattattttgttccttttttttttttttaatttgctttaagagtgcgatgccatatcaaatcaatgttgttctctcacggtgtactctctaacaggtgtgggtggggtttatggttgggatacgaggagagtctaaagtagcagattagtgtgaataaaaaagaaaaggtttttaggaaatccgggggaagtacattgtattgactacaatgctgatgtgatgtagccgttaagtcttcagtgatcttaaaaacaaaaaaacaaaaaaaaaatcaaccctaatttgttcttctgactgactagtttgaagttggatttgaagatgatgttgaaaaaggttttgaatgcaattaggttatgctatttggacaataaactcaccttgacctacaatgtctggctgtcactaacttctttctagactgctagccctcagaggagaacatacccgtcccccagttttagaccatgaatatagccagatgtgagtggggatatctgcaagtgtcttcattaggtggctgaggcaacagtgtcatgcctgggctttcaggatagcccccccacccatcccccgtcttttgccaaatactcactctcttgactgtgagtaagtgtctcctggtatggttgccagaaacccactgtgctatctccccacccttagccaggggagcaacatgagccaagtgttcggaaaggttcccataaaatgcctctccccccccccccgcaccctttccttgtatctctcgtgtgaggtgtcctagaatgcataagggtccccctggaactggaatcacagatgcctgtgagccaccatgcagatgctgggtgtactggctagttttgtgtcaacttgacacagctggagttatcacagagaaaggagcttcagttgaggaaatgcctccatgagatccagctgtaaggcattttctcaattagtgatcaagagggaaaggccccttgtgggtgggaccatctctgggctggtagtcttggttctataagagagcagactgagcaagccagtaaagaacatccctccatggcttctgcaccagctcctgcttgagttccagtcctgacttcctttggtgatgaacaacagtatggaagtgtaagccgaataaaccctttccttcccaacttgcttcttttttttttttttttttttttttggtttttcgagacagggtttctctgtatagccctggctgtcctggaactcactttgtagaccaggctggcctggtctcaaaaactcagaaatccgcctgcctctgcctcccaagtgctggattaaaggcgtgcgccaccatgcctggccccaacttgctcatgatgtttgtgcaggaatagaaaccctgactaagacactgggcatcaaaccagagaagccagaggtcttaactgctgagccatctcttcagacccatacttttgcatttcttgtatttctcttttttgttcttgtttgcgctctctctctctctctctttctctctctctctctctctctctctctctctctctctctctctgtgtgtgtgtgtgtgtggtgtgttttgagttagagtgtctcatgacttagctccgactgtcctgaaactcctgtctctgcctccccaatactgggattaaagttctgtgctgccacaaagggcttgcttttgtatttcaaacaaatttcctgagactcaaacatccatgatagcaacaaaatcagaccttctgttggcttatcagggacgttcctaacatccctctgtgaaccaagcgtccagaagctgccagatagtgttcggccttgggctggggaggaggaaagtggcagaaatgcccttgagagaggtggagagatggctcagcagctaagagtgtttgctgctcttgcacccaaatcagggggctcacaactgtgactctagttcctggggatccagcgccctcttttgcctcttacggcttctgaaggcactgcacacatgacacacatacatacgtgaggcacggatgtatacataaataaagataagagatgtatctacatataatgcttttgacagtgaacatgagggttcgtggcaccaacgtgatgtgaggatccagggcctacatctggtcttcaggaaacacaatggaagcaccacagctctgtggctgaagaacttctctgtgaggaaaccaagcacacaggcttgtgtgcaaacgcatggaggtggatcagcaactggggttgaatgtggcaagagccggtgttgagagaggagcagggcttgtgctgtggagaatggagaggtttgctccggcacatgaactgcagaaaacacttgttaggatgtccatgttctttggaaacagtaaaagtggaccttgactttttccaaagataaagagatgaaaagtgttttttcagggaaggggtgagtactcagataggcagcctgcaaagcacacacagcacaacagactttaaactccacaaatacatgtaggaagtgggctaaactcggccacagacactgacccagggcggccacctacctgatttcttgggaagcctgaaggtaaggctggaaattacctggtgactggtgacttgtatgttctgggttttgagggcctttctggaggtggtaactggtcaggtgcctctagttctgttcacagacttgagcagccagaattgactgccagagaaaaaaagagtccggcaatcctgcttacctttcgtcctcctctacctctctattgtcacctcatcagccttccaaagctttgcttactaaaaacactgcttcccatttaattggaaacggcaagtttctgcagctcctgactccaaacagtccagggatagccttaagtatgaggcccttcctttgatgcccacaaggggatgctggtgtcataggtggaaccaatctgcaaagccactagcatgggtctatctagagaccaggctttcagcatttgacctaggggagtagggagcagcctgcagagacccatgtcaggcctgtcccacacatgaacaatgacacttcctcacctgggcccctcatgggcccacagtctctccttttggattagctgggaccctgatttattgccttgtttcgtgttcttcagtgtctaggccagaagcagcaaccttgaaaggtgccagactgaccggatccagcctgcacagagtgagaaggactcctacagtcactaaaatagcataagagatctcttgtataaaagtcaagatcttaccaattcattgggaatctaggtcgtggagaccccagggcttcaaggcagggtgggctgcagtagagagtcttctcagccccttctccctgctccctgcctctacccactcccctgccctacccactaccaccccctgacatttctctgtagtctaggttctgttctttcctctggctgtgcagtggcattgctccaagggctgtggaagctatctgaaacctcagagcacagttctagtacgtcccactttgaggaccagctcttctcccagaagacaagagacccctgaatgaagcttttgtctgttgccctagggttttagtcaggtgatctagggtgatacaatccaatgtgcattaagcatgagcttctcccatttttatttgggggggggtgttgttattttatgtgtatgagtgttttgccttcatgtatgtatgtatgtgcgctacatgtatgcatggtgtctgatgaggcaagaggacattggatcccctgggactggagttacatgtagagagctttgggggctgcttggctggaatctgacattgggccaggacaaggaagtaagctcggaatctaacttagaacaggaaagtaagttcaggcaggaatctaattttaaactagaacaaagaagtaggcttcaggtaagaatatgatttggggcttggacagggaagtgggctcattgtgataagccctgagaaacagtgatggtgggagtgatcatggaactttgtgtattgcttcgcttgttccttgactgtgtttaatgccgtgtttgttcctcaacatagaactggccttatcgcttgcatgtaattaaaatggtataaaagcagactgggaagaaataaatctgcctcagcctcagaactggctggggtcatgctatagtgtctaattgtctttttctttttaacccttgctcctgccctggagaacctgttgactgactggcttggtcagtttaagatggttgtgagccatgaagtgggtgttgggaacttaactctggtcctctgcaagagcaacaaatgctctccaactctgagccacctctccagacttcagaggggcattttcttttacttgtaagatttttagttttggagggtttttgtttttgttgttttttgctttgttttgtttaactgcaaatctgctgggcatggtggcttatggagcaggtagatccctgtgagttcgaggttagcctggtccacatagggagctgcaggccatccaggactgaatagcagctggaaggggtgacggagggggtttgcaaaagctgtttggttggagagacattgctcaaggtcaaaagtatgactatcccaaactcttttacagagatgattgcagggaccgcccgttcactgctcggatgagctccagaccaaggagttgaatgagaatcctttcatcaacaaatgtgtctttgatggctactttgccactgaccaggtcctgtaaactttgatcttggtgactagcggcagagccagacgagaagtcacaggcccaagtgtattggtggaggatgcagaaactctagtatgaagcctgctctggaatccctgccagtcctccgctgggttcagttgcctcgtgattcacaggactcacagtaaactcagctcagttcctttatctgtgaagcaaagctcaagaacaaccatctatccctccaagagtgttatcagaatgaagtgagtcgattcattgaaaaacatagagccaggttgacacccagcatttgacctgcatttgctatcatcttgggctaaagcannnnnnnnnnnnnnnnnnnnttgggatgtaaagaaatatttgcaagctgaaggggtagctcagtggtagagcatctacctgctgtacacagtctctgggttccagccccaccacttaaaggttgggcatggtggcaccttaaatctcaggactgcaaaggtagaggcaggaggatctctgtgagttccaggccagctagggctacatagagaaaccctgtctccagaaacaaagaaagaaggagttttcctgttcacaaccctcagtctcttctggtgggtgtgactcca

SEQ ID NO: 1283 - DNA, 1255 bp, Mus musculus
ggcgagctgaggagagccgggcagttcggagggaaggaccggtgcgagtcaggcggcccttgaggctccgctcgcccaccttccactcttctctctctctctccctctctctctttgccatttctttcctctcccaaatctcccattcagccaaaggaaggaggtaagggaagcactccccgactctctctctctctccagctcagtcctccaaaaaataataataataaaaaaaatttacagtcgggaccgagtggtggccggctggctatggagctgctgtgctgcgaggtggacccggtccgcagggccgtgccggaccgcaacctgctggaagaccgcgttctgcagaacctgttgaccatcgaggagcgctacctcccgcagtgttcctatttcaagtgcgtgcagaaggacatccaaccgtacatgcgcaggatggtggccacctggatgctagaggtctgtgaggaacaaaagtgtgaagaagaggtctttcctctggccatgaattacctggaccgtttcttggctggagtcccgactcctaagacccatcttcagctcctgggtgcagtgtgcatgttcctagcttccaagctgaaagagaccatcccgctgactgcggaaaagctgtgcatttacaccgacaactctgtgaagccccaggagctgctggagtgggaactggtagtgttgggtaagctgaagtggaacctggccgcagtcacccctcacgacttcattgagcacatccttcgcaagctgccccagcaaaaggagaagctgtccctgatccgcaagcatgcgcagaccttcatcgctctgtgcgctaccgacttcaagtttgccatgtacccgccatcgatgattgcaactggaagcgtgggagcagccatctgtgggcttcagcaggatgatgaagtgaacacactcacgtgtgatgccctgactgagctgctggccaagatcacccacactgatgtggattgtctcaaagcctgccaggagcaaatcgaagctctgctgctgaacagcctgcagcagttccgtcaagagcagcataacgccggatccaagtctgtggaagatccggaccaagccaccacccctacagacgtgcgggatgttgacctgtgaggaagccattcgggcggcaagagagaggcgtgttcgtcatctgctagccccttctctctctagttatgtcttgttctttgtgtttttaggatgaaacttcaaaaaaaaaaaaaaa

SEQ ID NO: 1284 - DNA, 870 bp, Mus musculus
atggagctgctgtgctgcgaggtggacccggtccgcagggccgtgccggaccgcaacctgctggaagaccgcgttctgcagaacctgttgaccatcgaggagcgctacctcccgcagtgttcctatttcaagtgcgtgcagaaggacatccaaccgtacatgcgcaggatggtggccacctggatgctagaggtctgtgaggaacaaaagtgtgaagaagaggtctttcctctggccatgaattacctggaccgtttcttggctggagtcccgactcctaagacccatcttcagctcctgggtgcagtgtgcatgttcctagcttccaagctgaaagagaccatcccgctgactgcggaaaagctgtgcatttacaccgacaactctgtgaagccccaggagctgctggagtgggaactggtagtgttgggtaagctgaagtggaacctggccgcagtcacccctcacgacttcattgagcacatccttcgcaagctgccccagcaaaaggagaagctgtccctgatccgcaagcatgcgcagaccttcatcgctctgtgcgctaccgacttcaagtttgccatgtacccgccatcgatgattgcaactggaagcgtgggagcagccatctgtgggcttcagcaggatgatgaagtgaacacactcacgtgtgatgccctgactgagctgctggccaagatcacccacactgatgtggattgtctcaaagcctgccaggagcaaatcgaagctctgctgctgaacagcctgcagcagttccgtcaagagcagcataacgccggatccaagtctgtggaagatccggaccaagccaccacccctacagacgtgcgggatgttgacctgtga

SEQ ID NO: 1285 - DNA, 52302 bp, Homo sapiens
  misc_feature (11301)..(11320): n = a, g, c, or t.
  misc_feature (29267)..(29286): n = a, g, c, or t.
ctccgcaaaatttgcttaattcccttttcactaaaggagcaagctgatgctccatggttctgggtagctcagaacgagctttgtttaaagaggctcaccaggtccatggactgtcacctaaagaaggatctgcaagttagggtccattccaaaccgtgtctatatgcgctctgatgggggctctgtttgagttgtaggaataagctttaggttagtttaagctttaggttaaactaacctgctaagatttccttaagcaccctggagcagtgttatagtccatatattcttatgctctctatatttttgaagaccgctattctattaacttaggcagttctgttccttaggacaaggaaaacagcatttttcctcagctgacatgtaccaagtgcccatctatatgaggaactaaatgttaaaagttccaactcttgatagattaattctcccagatacctgggaagtgagagcatacctaaacccacaatttaagaatccttgtttaaaacataaagtatataataaattgattccgattttgatgatgataataaagtcactggaattttatagattttgagctgaaagggaacttaacgatcatttactacagccagttaattttgtagctgaggaaactcaatcttggaaacacataatctatccccaaggtcacagtgctggttagtgcagagtagaagcaagaaagagggtacagtcggccctctctatgcatgggttccgtatccacagatacacccaaccacggatcaaaaatattcagagaaaaaaacacagtaaaaaaataacaaatgcaacaatgagaagtaatacaaataaaaacacagcataaccgcttccaaagcatttactttatattaggtactgtaagtaatctagcgataatttaaagtgtatgggagaagtgtataggctatatgcaaatattacaccattttatatcggatttttacatcctggattttggtggtggggtgggagtctttgaaccaatatccccacagacactgagggatggctgtattctgacttctaggctagagctgtttcaccaacatgatgctaataaaaaggacaggattttctgcatcaattctaggagacagtcaagctaataatcagaggtctatattctgctcttaatgtctgggtgtcccaggacaagaaaatgagctattgtgacctcaaattccctagccaaaggagtgaaacactaatcaatgccctgtcagatacagggagggctcgttcagacgagaaacagatgctgtgggaaatacagctactcaaagaaaggaacgctctcagtatgatggaccaaggaaacggctctatctttggctactttaaagggactgagtcccatatatgtgatatgtgaatcagacatccaaccaactcgttcccatagaatataaacaaattaagaacataatttaggaacataattcttaaaatcactatgcaatccaagtaacagttacttgactagactgagttttaaagaaaagataaatttccacctccctggtttaaggtatgttgtggaaggtggataaaatagcatatcttcctatgccttttgttctatgattttattattttttaagaacatgtacttatccggggtattatttcctatgcttcatcactagacaatgtgcttcccagggacgcggactgtgtgattcaactctccttcctgtctaccttccaaaacattgtctatgtccacgatatccccaatgcctagcatagtgtttggtatgtggtaaggactcaattttaatcaaataaatgaatggataaattgcaaaacccaaaggcattctccaaagcacaaaaatctcagcatatttaactcttccattaaaaccacttaaattctaccttacagattggaatcatacccctgacatgttctgatgtatctctgcacagacctgtgatgttatcagtttaacacatatgtgatctctcagcatgaataaccttaatgaatactatatagagtttcagtcgcaaacttccagacacagaaggcgtattctgtgactggccaaaatggcatgaggtcctgcagtccattcccctggctccaagcaagactgcatctaatctatggttgagaatgatgctttcctgaatgggaaaggtttccactaaatgaaacatacagtctgccttggtaaagtcttaagtgtctgaatggaaggtcagactttgatttcttgaggtaagtatggttttcatcccaagtgtagcaaatttcactggcgttccattaccgacttacttaaatcatttgctagatgacataaaattgctggtaattacactacaaagagtgattatatgaagttttcttgtacaaaagcaagtaaatttgagccttattcaatattttgttagggaaattttaaattaaatatgccattttatttaaaaagagaaacattagaagaatatatattcagaagaaagtaggggggtagaaaaggttgcaagtcactagtttactggaactacacaatggggatgatgtgctgctacttgatacaactaaatttcctgagtttaaatgatttcagtgagacccccacacaaaacggcctgcacagccctaatccatgatctaggctcgcctctctcaaaatatttttttaaaataatggttcacgatcctgaaataattggtggccatgggatgccagatgtgagacatttcatctgaaaccttatgtaaactaacccaaaccatttgcttcagaatatcttccttgacaccaggaaagagtttgggtcctgggtttgcatttgcctgatggactgactggctgctctcaaaaatggaaacatatgtgggcacgatgaaggaaaggctttggaaattatgcaaagaaattttcttttcctttttaatcctgtctttttttttttgcttcccctaggcaataggtatattaaatgttggtgactttttattttcaaaagcacaaaattaaatgttttttgtgttatttctcagaacaataacctaactttggcatccatactttttttttttacaatttgatgacaatgtttaaagaaataaagtgaacatccccccacacacactcatcaaaagaataaggaagataatttttattattatcatcatcataattactattattaccaatgaagcttgaaggaactcacctttatacatcacaaagaaataattatttggtttacaactgatgagaccacaacgaaagtatgatttgagatagctaagagcagaaataaatttggattttttttgctctaattgcaccttccacataaaccccctttgctctggatttgtgctttttgagttgtttgcatcatgcataggtgcagactttgtttcaagttcttgtaagagcagatgcccttatttaaggctgagtaaagaggaaatgcattccttataggcatctacatccaactggcttggattgtctagcacacttacacgaactacctattttcaggtcaattctaaaatagaacatatctctccagaggtacacattttgaagattataaaactttacagtcaacctgtttcacatttcagaactcattccttttaatgccaacaaaagaacaacaagaaaatgattttagaaaaattttaaatctgcctcctgaaatttgccacaaggaaaacaaaccaaaaaaagcctcaagaagagaactatttctctgttttttttattaatttgtttttttaagtttggtaaatatgaatttagcatgttatggaattatgttataaactgtactaatagatgctagtaattcttaagtttaaagattgaaaattaaaatatgaaatatttattagaaatactttatattgcttcaattggctgcaactgatacacagctgaataaaaccatgaaatcgaaagaatatttaatcacattgggaaagtggacatttttaaggggaatgaatgtttgaatttggacaaaattaaagtgcttagaaaacaaataaaattgactattgttcaaaaaaaaattctggtgaggatagtcttgacattttacaaagaatttacatctctaaagtgcttaacttaacctccactacttaactgtctgaaatgaaggtgaagctaaatttaaaggacattttgcttttttagttttttaaacacttcctttggctccttccttttcttttaataatttatcctattttttctacctttatgcagacaaaccaagtgtccatcaaatcaggcaccaaaaagcaagcactcttaaatacagttcactcaggctaatcatgacagtaattactgacatttttattaattatagctcattttttcccccagaagaaacaaaaccaagtctcttgggtcagaccagcaatcataaaacgaaaaagaaataaataataagttaaaaatagagggaatgtgttaaaaagaaggaaaaagtactgttcataaccaaactgtgtcaccttaaaaaagaaacatttccacacttaatatctgattcagacagaaagcttctctcctacttttgaaacaaataattccacttcaaatccacattttcagacacccctagctttctgcatctgattcctacaacagcccctttacctcaaagaggtaaaagtcagttcacagtatttctctcccaaacatccccactgaagctccttgtaaatttcagcataaactcagaactgtcaccgtgggtttagaaaataatgacacatttcagctataaccccccagattgaaagattaaaaggactttgcccaaatttaggggaaatgaaggtgcgtgggctcactctgcagctgcagttttcagcccttgcagtttagaagattctgcatgagcacggatgccacgagggtatccagcgagtgggaagggagtcgccctacatgttttcacatcgatttgtaaaactgttttgaaagggtatttctagatccatttgttccaaatgcagcaaaattcatccgatatcgctcacaatgcatgcacgggttatcttacatgtaatagccatcgtattaaccaacccagctgatactgagatggtgaatggggcgggggagcagggaggaatatgtcgcgcatgaaaaactccgggtgtaaaagtcaatgcagaactcactccccgaggaaccgaaaaagacattcacgactctcaagtggagagaggatagaaagtcaagtggcgggggtcgcgaccagtgatcgggatttcagtctgatctcagtacccagcggaacaggaccataacctaaagaaatgagctttttccggagcaaagagcggccccgatttcaaagtagaaaaaataaactgcttgggggtggaagatggcgaggggcggggggcggggagggaggcgggtcgcggcgctggctccggggtccgcggcacggcctcctctgccgcgctgcccagggcccggaccctgcccggcgctgcgcccaccgcgagggtgccagacccgccgcgccgccgccgcgctctcccagccgcggccccctcccccgccgcttcctcttgctctcccagccccttcccccacgtgtggatgacgtcaaaattccgcgaaaaagccgcgtggtggctccccgagcggaggcgcgattccgccgcccagcggccccctgcccgggggcgcctggagggggagaagggcggaggcggccggttccttctcctcccgggaggcaggaccccccgacgccgaccgccggacgccccccgccccaaagcttattggaaaattcacttttgtaaagcaaatgtatttccagagctattttcggccgcgtgaggcgtgtcctaagctgaatcagacaggaagagggggaagttcgggtcttttaattttttttttttccgaagggaggggagtgagatgctaggtgggtgacagacggcaggcgctcgccttcttaactcacgcctgtcgcatctgccgcctcagtaatccagccccgtccaagccgaaattcgccgaagggagtgcggatgcacaggcctggcggactctgcccccctccagaacgcagcggcccagcgccccggcgggcgcggctgcgaccagagggtcccggaagcgagtgaacacctgcaatcgcactgcccgtccccacccaccctgctcccccgtgctctccgcttcccgacgttttcctcttctccttgtccgcatttttctactttgcctgcactccctccttcctcttgatgtgcctcctatgtgtcccctcggatttatgtgtcccctcgcattttgccagtcgggttttcggttttgattgaccgtccatccctccacggagaaacacaaacacagctccactctttgggggagccgaggggaaggcagtggctcccatttctgagcctgaactcagtcactacccgctccccacctggcctaggcgcccctgcgcggagaaggcgggactcgaactcgcgctgctcccgggccttgagccgaccgcggaatcacctggctgggaggcatcctccaggtaagcttgggagtatgtgtgcttagtgctgcaggctcctgcagaaaagtgcctataaacacccaacaccctgctgcaccctccacctccaggctttgtacactttccaaccgaaactccaaaacgctagcgtagagggtggggagccggccggaaaaagaataaaagtccaataaaactggcgttcgctaaagtttatcaccagtcctacatgggatatatatatatgtatttttttttccgtgaagggtgaaaaggagataaggaagaaccaacaatctaccccctcccgccgctccccacccccgcgccacggtgatcagtttggacttcaaagccagagcacaggctcttgcgctttttcttgaaaccgaagtctacactgaaagaaagtgtgcacttttgcctagaaggcaacatgcgttttcccgcgtgctaggtggagtgcattttaacaagacattagggttttaacacatggctggagtggcgaccaaaagggaaaactcagtttccagtccaagcctcctagagacattcctgccaacctccgcaccctctcacgccccaccccacgtgtgagagtctgcaaaaccaccggggattggattcgatggcgagcttcacgctcgggaacagtcagtaatcggaaggggaagtggacaggggaacttcaagaggcgagcctgccacgcgggaagcgcccgaacttgcgggtctccatgaatgcagagggcgccgggaagggggggcatccggccgcgaccctctctgcccctcccattcgctgcccccctccccgctggaatttctctgtaaagcaagacggagtagggggagggggagagggaaggggcgagagggccctcggctcactcccgagacgtgaggactcgccacccaggcattctcctcggggtgggctgggccccgggacgaccacccgcttcttcctcgcccccgctgcccccacttcgggagacccagagctctggatgcctttccccggagaagggggggtgtgcggagtcggggtggaagagaccttgctcgcagagctatatcaagtgatgtccagaggctgggagccccggcggcctctgtcccttgcctgtcgggttagatttatactttaaaaatacctcccgccctccctccttctctcgcctctccccgctgcaactttctttgatccgctcaaaggtggcttaggtgaaattggagtaattcccttatgggggtcttaaaatgtaagtgaatgtccttatccggggtgactcaaaagcttaagtcgggaagcccaacgtgactaaaaccaataggtgattgttcggggccgactgtgtgcgggtgtacacggtattcggcccgggtgtcatccgcggcgctggactgtttcattttgagtttgcaacttgggtttttcagcgagctttttttcttcctgaaagctaatggcttccacagcaattagacattttcctcgcccgccccttccctcccctttctttacatataggagatgggatactcattcccgctgctattgataaggtcggaggcggccgggcctctccccagctttcgcccgccccagcgcccgctctccctccgccctcccttggcttccttttgatgtagtggggaacgcgtcctactaaaaaaaaaaaaaaaaaaaaaaaaaaaaaaaagtaatctgcccggtaacaatcagcgcgcagtagcaggagccccagagctattggctatgcaaatagagggaggggagacggcgccccaaactcttcctcacccttttaaagcgatatcccctcctttcccccccaccaccccttccgccccaccctcgtttaaagaggctggctccggggcctgagttaatcgcttgcacctctagtttattcgctcccctcctccgccttgcagggaacctagtgtacggctcacccagcccgcgccccaccccgccttgctggctctccgcgcccctgcccgggccccctctctcggtgagggaggcactcagtcggcctcggtgtgcccagagagctcgagccacgccatgcccgctgcacgtgccagcttggccagcacatcagggcgctggtctctccccttcctcctggagtgaaatacaccaaagggcgcggtgggggtggggggtgacgggaggaaggaggtgaagaaacgccaccagatcgtatcacctgtaaagacagccttgactcaagcatgcgttagagcacgtgtcagggccgaccgtgctggcggcgacttcaccgcagtcggctcccagggagaaagcctggcgagtgaggcgcgaaaccggaggggtcggcgaggatgcgggcgaaggaccgagcgtggaggcctcatgcctccggggaaaggaaggggtggtggtgtttgcgcagggggagcgagggggagccggacctaatccctcactcgccccctccccctcccgggccatttcctagaaagctgcatcggtgtggccacgctcagcgcagacacctcgggcggcttgtcagcagatgcaggggcgaggaagcgggtttttcctgcgtggccgctggccgcgggggaaccgctgggagccctgcccccggcctgcggcggccctagacgctgcaccgcgtcgccccacggcgcccgaagagcccccagaaacacgatggtttctgctcgaggatcacattctatccctccagagaagcaccccccttccttcctaatacccacctctccctccctcttcttcctctgcacacactctgcaggggggggcagaagggacgttgttctggtccctttaatcggggctttcgaaacagcttcgaagttatcaggaacacagacttcagggacatgacctttatctctgggtatgcgaggttgctattttctaaaatcaccccctcccttatttttcacttaagggacctatttctaaattgtctgaggtcaccccatcttcagataatctaccctacattcctggatcttaaatacaagggcaggaggattaggatccgttttgaagaagccaaagttggagggtcgtattttggcgtgctacacctacagaatgagtgaaattagagggcagaaataggagtcggtagttttttgtgggttgccctgtccggggcccctggcatgcagggctggatggagggagaggggtggggggtggcgggggaccgcgtttgaagttgggtcgggccagctgctgttctccttaataacgagaggggaaaaggagggagggagggagagattgaaaggaggaggggaggaccgggaggggaggaaaggggaggaggaaccagagcggtgagcgcggggagaggatggagagctaactgcccagccagcttgcgtcaacgcttcagagcggagaagagcgagcaggggagagcgagaccagttttaaggggaggaccggtgcgagtgaggcagccccgaggctctgctcgcccaccacccaatcatcgcctcccttctgctccaccttctctctctgccctcacctctcccccgaaaaccccctatttagccaaaggaaggaggtcaggggaacgctctcccctccccttccaaaaaacaaaaacagaaaaacctttttccaggccggggaaagcaggagggagaggggccgccgggctggccatggagctgctgtgccacgaggtggacccggtccgcagggccgtgcgggaccgcaacctgctccgagacgaccgcgtcctgcagaacctgctcaccatcgaggagcgctaccttccgcagtgctcctacttcaagtgcgtgcagaaggacatccaaccctacatgcgcagaatggtggccacctggatgctggaggtaggtcggggggtggcgctcgccaggagccaggacccctccggatgctcgggtccccggccggagccctaaacctgggagagggcaatccccgcgccggcctcccggctcctgtgcgggagtttaccgcgcgccttctggcgagacgcgtggctttatttctgttcctctccagataaactggggaggcagaggggggaggaaaatctgggagaagcgaggctgtcctgggcgggggtaggggagcatcccgcgcgcgtgttcctgcatgtggctgcctcttcttcccacccccctcgcgacctgtcttttgcgaagccgccgcggctgcttgcgctgcggccaggaagagagtcggggcctgaaatcgggaccccgagtagaaaggcaaccccccccaaaaggccagagcaaattcgtcttggcctcaggtccccgcctgtggtcgcgactccgcgctggcacttcaccggggaggtggagggaggagggagaaggagagaaacggggaattcgggagccccggaagtcccattgaagaaacgcgtgtttcaggggaacccaaaagaaccgcttcttgcccctcactccaagtctttgcccagcgagccgtgtgcccacgtatgcacagctctggacctgccgtggtttcgccatgttgctttgcaaactccctttggaaaggctgggaaacgtcgcccgcttaccctcgcaccccattatcccggccaccccacttctaatcgtgccctctcccccaccccccacctcacgaagattacttacagtttggttttccagcttcctcggtgcggagatttgggtggggtaggaagnnnnnnnnnnnnnnnnnnnnattcgttttttcttggcggacaccccgggcaaaccggagggcaccgaacggaacggggcacggaacgacggcgaacgaggaggcaaagagagcgccgcccgacccacgcccaagcgacgcaaagaaacgccgccgacccaaacccccgcaccacaacggcccccacgaccaccggaaccgcgccgcacaccccccagcccgagcagaacgcagcaaccccacccgccaaccccagcaaaccgacgccaaaagcaaaacaaagaaacgacgcccagccgccaccccggcgcagcacccccggccgcgccaccccccaccccacgccggaaggcccggagacgcaaaacgacgggaagcgcgccgcgcaccccgcggcaaagacaaacgggcagccccccccccagcctcccggcccgcacacccgggcgagacaaacaccgccccagcgggtatgcgacgaaagtattccgggtcacccctgaaggacaggtgggagccccccgtgcctctttccagggctctctgctcccgtctttcccctcgctcgtcaccgcgttccctagtttctgtccttgtgggccgcagccggacactcccgccgcggcgctcaccccttcaagtttcctcccgggatccaaagccccaggggtcggaatacagacctttctggcacccgaaacctctgtttcgggaagcctggctcttctttggggttttcacgccaaaagggcttttctaggatatttcctcgatttttaattattttttgaaaccatccccccctgctccgactccagctgccgaggctgcggcgctcttcctcctctcctccctccccctctcttccccacctctcctcacccgccccctcaaaagcggcccctgggccgcagggatccccccagacattttttccaattgtcgggaatgatagaggaggatctggggatccggatgagaccaagaagtggacccccggagcctccagaatatttttattgattttttgaaaagatgacgaaatccaaaaaagagtgagtgagttagagtgcgcgaaggagtagccaaagggagcgtcgcggagctgccgcggctgctgcgcacttctccgactccccgttttggagctgtagttcacccccttttataggatccctgggaataccaaagcactgatgggctattctgattcactccagtttcctcatctttgttctttattcttatcacgcattctggtcccctccccctcccacaaaaaaaaattaattttttttgtttcgatagattacgcttttttattctttttctcttttgctgatgctatgctctccacccccgccccccaaccctttcccactcccattataggtctgtgaggaacagaagtgcgaagaagaggtcttccctctggccatgaattacctggaccgtttcttggctggggtcccgactccgaagtcccatctgcaactcctgggtgctgtctgcatgttcctggcctccaaactcaaagagaccagcccgctgaccgcggagaagctgtgcatttacaccgacaactccatcaagcctcaggagctgctggtaatgaccggccccttcctcccttcctttctgcgattcccgctttcccctggccaacaatatgccttctatcaccactgccagagcaaattcttgggatccagaatgaccccaccaatagaatttacccacttatgggcgatagctcatttaataggaaaccactgtttattttttgtgtgttcctactatgtgcccaggctccgtgcccagcactgaggctacatctgtgaataagatcctcatggagatttgggttggtgagactcatttgcaattgtgtatgcatgtgtgtaggggacgcatggaatattttaattaacagtgataatattttaattaaattccaaatttccaaaaatagtctgagaacgtgttcacatgataggtatgtggctgtggtgtctcctaaaaacttggagttcaaaggtaatgccctctatatctacaaagtctcaagataccaacacataatagctgttcactaaatatcagttcattgacttttgagcaaagtcaaaatgtggcctttcactgaaggagtccgaggcctgggttcctacctccagtgggactgtgacctctgtacaaccccagggatcctgtcttatctctgcttttctaccagggaacctttttcccacctgatctaactccttttccctgcagcttgacatgtaagacgaccatattgcagctgtaccgcatggaatagcggctccaaggcccaccttcggtggtttgcacacccctctttgcactgttcagaaaagcaccccctccttcccgcccctccccctcctcactggtagggcccgcacaaagtccacagggctgaggctggcttcttgaactgagctctttgtgaggagccttcctttctggggctctgctgccatctagtggaagacatgcacaaggttgggggaggaattgccgagaatgtggagaggggcctgaatgacttcacctttgaaccgctgccaggttttagctgcttctggtttggtccgagaggcctagaaaggtgctttcttctgggagatctgcttcctttaataacggtgcaagaccagtggttcgtactcgcattaccctgtgaagaggaagggctggcatttcaagccatctttgaagatgatggtggtttagtagtttattggggtgctttaccccggctgtccacagaaagccaaggcagattttaaagcttatgaagaaaacattgttagaattgggaaccaatttgtttttctcatgagagagcaggaaaaatcatcttcatatggttcatttgtttcgagaggatggtgaattgagatgttcttcaggacacccaaatctttccaggactagccaagcaatatattgctacaaacaaacttggctttttcctattccctttatcccagaagttgggatttggaagagtcctattttacaaatgagaaggctgaggcctgggagggaaagggaatcacccccagccccacagctgtgggactggtgctctggttgctggtttagcaaatgaaagagattccaggttctccaggtgaatgggagagagggtgcattggcaaacaggccctgcctctcattcttctgatgacagctcagtggataggcatattttctggtagcacatacgatatttttaatgttttattttggaccgtttccctttgagcacagtttcccgtaagtatctcagtgaaagagggaaacaaggttctttttcaggtgggttgctggtgagagacccaagagacagggttgtgtggtccccacacttgcactgagggatgctgtgacactgagcaggcaccctcaccttgccccagatcacctccatctgcaaaatgaggttgctaatgaccatgtggtcctttagtcatgatgacaatggcctgtgaaacatttaggggaaagggctgagtgtcacatccccagaatttctgcctgatatgtaaaaggggagtttgagcagcagagagataaaggcactttttggcactaagtaaaagcaagctaattggttgccaaggagttgggccaaggaaccttattttgagctttatctgtgtgcatcatttttccatgaagattaaaaagactattaattcggtgatagagacatatacaataaattaccatgaaagggccacaatgaccttggccgtatctcattgtaggttcagctttctgggtgggcgggaagcagtattgcctgcaagtcagggttgggagggggtaaggggagctggagtggaaacgaagtagaagaaaatagaatcttggcaacagctacctgggctctcattattttcagtggagcctgacatttgaagcataagaagagctgtcaacaacttcaaagcttcaggggcacattgacaaatgggcccgccttacaatctagcagccacgtcctaatgagcggccttaaaactggtctggagcccaacccccagccccctacaccaggtcagcctgtggaatttagattctcctcttctcttcctgccttcccctccaggagtgggaactggtggtgctggggaagttgaagtggaacctggcagctgtcactcctcatgacttcattgagcacatcttgcgcaagctgccccagcagcgggagaagctgtctctgatccgcaagcatgctcagaccttcattgctctgtgtgccaccggtaagatgaggcttgagccggggagggagatgggggagctcttttgggagatgtccggggagaggcaaaaggccgtaggaactttcattttagttcaggagtttggaggaggggtggtcttgagtagtctaaagtctgaagtttcattcctgggttgctttttctttatctgagctttatatattcgctttctctgctaaactcataaatggtttatgaggacaggtgtggttaaggcaaaaaaaattagtgcctgttaaaatattctttatgatggctaaagtgctctttgaagattacatatactgctcactggttgtgttcaaatctttaatcttttaaggaaaaggatggcttggagataagcccaagaggaaatctcgagggggatgggggcaaatacaggttaaaggaacaacgtcaagataaatatgctgcctgccttgattagtggtaagggagaccaaagaaattcttttttttttttttttactgtagggcatttatggccttctagctgtttgcttctctagctgtttgccccactgggcgcgggagggaacctggttggctttcggtgaggctttactttctgagcgctgggttctgatgccctcagttcatgtggaggtgttttgattttggccgcagcctttaacgttgcaattccgcctaccacgtggatcccacaattgatacatcattcctactggcccatttgttttgtagtttcctaataaaccaaaggcagtggtttgctgttgtcttattaaacagccttggccagtgtctactggttttttgtttttttttttcttggtagtggccatggcagagaccctggaaccttactcatccaagggagagatgtcaggagttcatgttttgacaatcagaaaccttaggtaaaaagctgatcacttgggaagacctttcggtgtgcttcacctcaaatttgccaagagtagttaaatcgctaggtggactcacgtggtaacttttttcaggatgttgttacatgttactggtgagttctacggaacggatgattatataacgtacgatgtagtgcatatgccctgtgctcacagtcaaaaagtcaggctttgctgcatatcagtgagtgacctttaattggctgcttaacctctctgaacccgagcttcttcatctccaaaacaagcctattgatacatcatcctacagccttttcagagcagctaggaaaattaaaatcagaaagaggtgatgcacgtggacgtgctttgtaaaccgaagtgtaggttggaccttcactaattgtgaaaatgctaccatctccgattttcaccctgattttaactgttccgactaaagtggatatgatggctttccttttctggctgcccttacgtgtttctagcaggacctgtgtgttctgcacttgcaggcttgagtgtggagtcctcccggccccctgcctgttcatctagggcacaggtttccccttgctggttttctgtagtcctgttctcctggatgcaggccaggcctcatggcgtgcacatgcgccctgtgccccttggtgggagagtccgttatccttcctgcagccctgggggcggttcttaggacccctgtggacccctgctgccttttggatagtggtcactctggcttccttcccttctgctgtctggcccgggcccgagaggtcagtcctccagtgacctgtcattttgtctcccaggctcggctgtctccttcctctctcatcatgattcactgtgggggaggggtcagccagttctttctctctggcccaaggacagctgacccccgaccctaaactcccccactgcccagctgttgatagccagagctctgctcaacactgtctcttgactaacagatcttttggggtctaactgccccttcctcctctctgatctctgattggggtaggggtgctgggtggagttaccggggtgtgggcagatccccagattccgtctagacccattctcgaaaaccggggatcccatcccccacccgtggccttcttgcccagatctttgggctggctgccagctccggggccagagtagggagcctgggattcagagactgaggacagaggcccagagggatacagaggcagttataaagactgtgttttgggggccttgaactagctttggtcagggactaggaaaggacacccccaaaccacatgaaaatggtgtgctaggcactaagcctcaggcgtggacagggcagagcacaggtaggtcctcggcagtttccagggtctggaaaggaggggcctgtatcgaaagaagttgctttccctcatctgcacttgggtttgtgcaactgactgagtcacatagaatcctggctgcgtggagttttacaacagtcggcctcacagtacaaacaccgaaggccgcttttcttgaaggaaacaccttccatggagaggcgattgtgcattgtggggccagggtgtgatgaatgggcaaggacccaggactctggccagtagcgggcacagagtgactgagaggcagaggtaggagatgcagattccccaacccgagctgttgccctcacctgctcctcaaatcgcacacttccctccttttctcgcagtcctggatgttccgtcctggagctgatgaaacacctgcggccagggtctcggaggtccacagtgggtggagggtgggggtcccgagagatggccgccaaccctcaggccgtgcagctatttgatgggaaaagctggttgtgaaagagctggcagtggttctgcagtgtgtggggagcgtatttgtgtgtgaaaggggaagggagagcaggagaacatagaggggccgcgtaagtgtggcgaagtggcggtcttgctttatggggctctggattaagatggtggcaaggcggagaggagccctccttccttccctgctcagcctaaaatggcttctggaagagcaagggccgcaagctgctggtatccctctgcagcaggtcctgggcagtgcaggcatgggtgggttgggcgggggatcttcctgactacagctcctagcattcctgttcctggagtttccaaaactggggaagcagaactgagccatagcttccctggttgccgctctgctgatagaacacccaggtctgcaagcgaggaaagaaggccattggagatgacctgggttcgcactctggcactgggagattgttgagatgtgataccatgctcggtggatgattccagttagtctagcagagccaatggcattgagtttacacctggcaccgggtagggggaggtgctcaccctccctctccaggcacccacatcccctctttcttcactagaagcccaccctaagatgctgcaccttggtatttgtgccacacacggtagccacccccaggcctccccacgccaaggccagagccccattgttgactagaacccattgtgctgtcctagccccttccctggctttacctacaggtgttccctcagattccatcgccaagtgagagggagacagtggtggcccagagaagttcgatgacttggcccttgatctagagtgggagatttcgccttgatgggtgctgggaaggaagaatggaaacccgtctttccatctgcaagtctctgagctacccctgaagccgcgaggtcatgggactgagggggagtcgttagcatgccctgtggggacaagcagccaggcagtgtggtgcttgccatcgctcttccctctggctgtaagatgaatgggtagcaggctgctcatcgccctccaaccagccccctccccagctcctcccagcaggccttgcagttgcatgggcattcccttgccatggcagccctgccccacaaggacagggtatgctggtcctcttatgggggtggcagatgaggtgcgtgcccagtgacgtccctggcctgtgaacactctggttctggccctttgaacttccacctgactgcaggttggagaagagagatggggaaagcctgacctggccttccctttcttcttcagcgtcagagtgcgtatctctctccccctattggtgaacagaagcaaagccatcacccctgcaccccaagacctcggccaccatagccaaaatgatgggtgctaaatgtactgggcaggaccatgtattccgtggttttaaacttacttagctctgaactctttatttggtaaaatcctaccaagaagtgcagataccaagttgatgaaatggagcacttctcagggcccatgcccaggtgagggagcccagcgggacccccagaggctcccagggcatccttgggaggataagccttttgtgcttgctggtgccggggctgcggctgggacccaattcctttgattcctgagccagagcgccacctttggggctcttctcccacttccgacgtgaaaggctgccctgtcctcctgagtggtatatgggaggtgactttgaggagctggtcagcttccagtaagttacgaagagctctgcatccagagtctcaaagtctcatccggatcccaggcccaacactcacagtgagtgacatcagccagatcacttcatctcccaagacttcattgattcacctgtaaaaggagatgtttgaaacagatgaatttcaagctcctttttattaatacctcaccatcatcaccgccgtcataagcaagcatgcagcccacagcagagctgcccctggcgcctgtgggtccagctgggattcccctaaggtgtgtcctttgcctccaccattttgccaggagggaggcgggaatgtcgggtgttcctggttatctgggcatcgttccttggctcgggtgaactgcatctcaatgaattgtggaatgtgctgggttagagttgccaacttctctcttccattcgctgagtgttcatggggttcttttcattcccctgtggggctgcactttctcccagttctgcaaagcagcaggaggctttggggactcgatgatgtcatttctgggacacatacacaactggatagtgacagattctccaggaagcacagagccctcattcttcctggcctgcttggcctgctccctgcatctgcctgcaatccagggatgctgggcgcctttctcctcatccctccagacgctggagagcatctccagtcggaactccccaccacagtcctgcaggaagtactaggagtgagagcagaggaggggcaggttggggaggatgctggctgacattcattgcttaccttgaaccaggcactgtgcttttacaaggattattttaagtgaatcctcagaacagcactacaacgtgggtattgctgttgtcattatttgcagatcagaaaatgaagactcagagaggtcaggtaacttgctcatcttcacacacttggtaggtggtgggatggagattccacctccttctgattccagagctaatactctgaaccagtgagctgtgttctccagaggtctgctttggttggaggggagctggagccctaggccctgggacggcctctgttgcccatggcaaggcgtgtggctgctcctgctctcttcagatctccagatgcagcaacctggagaaaggccctcctgggtctggtggggactggggcaggagtggaggctgcccaagctccgtgcactccacgttccagcttggagctttttgagtctactctccaaatccttcccatctccctgaagagtcttctgagaagtgtctcaaatgctcctcttcactcaagagcctcctttctttttttttttcttttctttttcttttttttttttgagacagtcttgctctgtcacccaggctggagtgcatggcacaatctctgctcactgcaacctccaactcccgggttcaagtgattctcttgcctaagcctccagaatagctgggattacaggcgcgtgccaccatgcctggctaatttttgtatttttagtacagacagggtttcaccgtgttggccagactggtctcgaacttcggacctcaggtcatctgcccacctcggcctcccaaagtgctaggattacactgtgagccactgcgcccagccttcaagagccccctttctttgagaagtttcttcagaagttatccatatagtagtacagacctagccattatagcacaccatcctctactatctaatgcattgatgcccagccttaagaagtctgaatattgtacgttttggggggagtcctccatgctgcctggaacagggaggagcacattgtcatgagtcgatcagaatggatcgctgatcggttcattgcctctctctctgctgcaggaggaaggatctcaggaagtcaccagcatctcacctctccaggtgggcaattaacgatggcgagggcacaccctcacccctgagcgtgccttctgcaccagcatattgcttgttggcatttttgatcaagagacttaacagactgctgagaaatttgtacctggtttttatttgttaaaataatattacgtacaaattttacaaactcatctgtgtttctcccacctaacagaacagcttttattttccgtgcatccttccagttcatccataggcatatatgtatgtatttacccatggttgtaatcttcatcgtcgcatgcatgcatgcaatttggttttccgcttccttcttctgagtggatattgtgaccatttctccatcctgtcatagcgacaaagctgatggtttccaggaatggctgcattgggtaggtggagctttccacagttgagggtgggggttggctaattacagctaggaagctagtgcacagatgaaatgatgtttgatttttttgtttttctctctgttcagtatcccctaccagtagagagggggatgtccttgagagtggtcctggggcagccctggtgccacggggaagtagcgccgctctgtggagagggctgctttgtgaatttgccggctggtagacaccgtgatccattctattgtctcctcattgttcttctccttgggagtcattcccattccagatcctcaagtaagagcaaagtagacctgtaaggcacctgggaggttatcctgcttactatctttaaactcttgacctaagccatgtaggaagaaacacattttataacacaactcaggatacttgtacaagtatatcaaactgatacaaaagtttctccgaacaatatttactcttaacgacatacggtgagcctgatactttctatcctactctatttggttaaaggagaacaacaacagaaagtgctggtcacgacccacaaatgcatttcatgacccattaatgagttgcagctagaagttagaaaaacacttatctcacccaacccgttattagacaaatgggaaaccaagcccttggaaagaggaagtgacttgcccacagtcccacgtctggacctagctggagggctgatgttgcctcagtatttgactaacctggaggagaggtggggcatgctcagggatcccgaggaagatgctcgtcttctgtgtagcgggcaacagagggcagcacggccgccgtcctcgtctccagcggcgtctctcctctggctgtgggaacacactgctcctttggtgccactctgagctgctgagaggcagtcaagttcatgcacatagtgctccccaattctgtgggattggacagtgtccccaagaggactcccctgaaaatcttcttagtaaaacaaaaagggaggtagagtctccctgtgcaaccggtgcacctgttccccctatgcctgctggcttccagaagttcattcgtatgccaataataagagttggttttgctagcagtgggacagcagagatgggcatgtgtgaggtgtgcttcccggtctgaggcctatggcagagggaagggagggccggggatacttgcctgcctcttccctggcagatgctcccacccgggcctttgtgggcccagggccatgggccggctgccccgcttgtgttatgaatgtcacaggggggagctaacgaggttattgggcagagaaacactctcctgtgacccatgtggaagagacctacagcagagcaagaggcagggaggctggctttgtcacactgttcatggcgacagagaaggcgtaggaggggcgggtggacagcaggcgtgggcgcagcaccattatatacgtccctcaagaggtggagatggtgagagggcaatggagaaaaagccaaggagacaggcagatggccaggtttgctctgcgttcatgatgggaggggagggctgtgcttggctcagggatccacggtgtctaacaatgctgctaacttgatgctggggcaatgggctgaccattaaaagagctgctgtagaaagtgtgtttgtaatagagtgtgtacaggaggaaggggaaataggagaggggctggtttttgtagatttaacctgattgtttttgctgtaagttgaagggtgacccacggttccctgtatgctgtgtctcctgcccccacgtgccccttccatgtctacacacagtaagctcactagagcaatgctaaaacgagaaagagtacgctttggaagacttgctgcactccaggaccgtcactagcgtgatggctgcaactatacccaccctaatatctgtcaacacgagcaggggcaacttaaactctcaaaagtctcagggttctcacccataccattagggtgacgctcgtgtgcatcttctgtggctgatgggtaaattaaacaggacgtaatgtgtagcgtactgcatgtggtggtcattggtagctgtcagcagctgtaacaggagaagttggctgtctttatttcccctcgatggaccaagcagctgctggatcatggccacccagcccctctgaaggagtgctcggaggaacacaagggggctggtcttccaagaggagccctctagcatggcagtggacggggttcaagcccctctgatttattatcctcattctgcacttccctgtagcaagtcacatttttttctcttagcaataaaatggggccttcagtctcatgagtcataacatcgaaaccgagtcacccatctgattcggatgcaatgattaatcttcagtgcttagttagagccctatgttagggttagaatcctctgccctaatgttctgagggttcttgctgttgggccagaggttgggaactgggtggaactcagcccccactcgcccactccctgcattgctgcttctctcatttccttttttagatcaaaccttttttttttttttgggtgggggtcatattaatcctcaatgcctgtccagagactataacaagatcccatctgaattagcattatgcatagattttgcccgtttctcccatctccttgtactttccctccttctcacatctggagcccctggtctgtcctgcttgcatggcccatggggtaccttgtctgcactggtctcaggcattctctgctctgttcccaccatcacctctagaggagactatgactcgctcaccttgctccccccaccagggtcaagaatgttaactcagacatgcttaatatgactgggatctggggattggggaccttgaatcctctgtgcattcattgtgtgcgcttagataagctgtcttccttccctgcctcagtctccttcgtttaatctggaacagccatggtgatggcaaataaacacaggctccttgtgaaagaactcgagggaggacatgcctgtagggcacggggtcactcgcgccgctgacctgctgccgtcctgtttctgagtctctgcagtctcgggagctccaggatccaaattcgttctgtgccctgaccttctgcctctcattccttgcagactttaagtttgccatgtacccaccgtcgatgatcgcaactggaagtgtgggagcagccatctgtgggctccagcaggatgaggaagtgagctcgctcacttgtgatgccctgactgagctgctggctaagatcaccaacacagacgtggtaggtggccaccaccttcttggctaagtccagatgtctcttctcagctcagggaaggagacgacggatttgattatgttgtgtcagaggtatttttctggtttgtttcctaagatcgacatccaagggagtgcaaagttcagcaggtgacaccccctcttaaggttctgaaaagctgtgcacgggaaaatacggaagaaaactcagcaagcagatgaagggggtgggggtgggagggctgtttaccgatgttcctttatggcgtgggcttctcagtgggtctgaattgttgcttcattgccatatttgtacacgctgccaggctgcctctgcccggcagcgaagagctgccgtgtctgctttcacacgctgaggctgtaaggcgcacagaggagaaaggagagccaggactcagctgcagtggatggagcagacacacaagaggtgccccactgtgagaacggtgtccgtccctggcaaacctctcgacccctccccgctctctcttcccttttgttcaatgcagtaatggattacaaagtgctttcaaaagacaaagtgccatacaaactcaagaaactattattagctacggagcttccccattctgtgtgccctgtggacggcccagaggctgttaacttcctgttgccagaatttggagctcctgagaagaaaggttttgagagagaccagggtcaagtgagcctctgaattcaatcagcaggaagctgcagtcctagcccgtccgagacaggatggtgccaagaggtcagagaggccattccttcgttttccacgggcaggacagggactgaagtaaccagccaggagcggggtgggcagtggctgagctggggctagaacccccaggctccggctgccccctggaaacttcccactccacccttgttgccgctcctgggatcttttggtttgaaaaaaaaccctggggtttaaagtcaacctgagagaggggtgttggccctgagccctcatgcatcaccatggagaggctgaagaatgctgggcacttcacgatgacaccctctggatggtccggggggattcagatgccctctgcgggcttttattgagttaagggatcatgtggtttataggcctatggctgaggcctgcacgagggatacgggacaggttaaacctcagagagcccacggctgcagctcgccggcctcctcgcccgcccacctggattttccctggcatttgttcccagctcagagaaatggcgcagggagatgctgacggagcaaatccggggtcctcctctgagatagttcgtagatatggttttaaaatgcgggctccaaacatacgctttttaaacgaggactccagaacacagactgaaaacctccctccagtgcagcatgaagaatgcttttctaatcctccagaggaaaatcgtggacgggacttaacgtttatagaaatggtacgctttcctccttttctgaatgtctccaattaaggctgccttacaaataggactctcagccagtttaagacaagcccttcctcaatgcctggagacaaaaatgtcagtgacaggagttggagcggccacccccctcctcctgcccccaggcattgtaaccttttcccccgatgttgatagacctgctctgatgggctgaccaccctaccggctccagccttttcccacctccctttgtcccccgttactgatctcacatggacagtggtggaaatttccctcctgggagttgctgctacgtctcttggcttttcgagaccgcaggcaagtcagtccgtcatctcatctggggaaactgtttgcctttttctgatactacgtagccagtccatttaagtcagctggccaactctgttaaatggatatgaagtgggtacgaagctggtttaggggtgtcctcctataaatcctaactgttggtcaagttgatatctcatttctataatgggcacacgccgtgtttcctaactggggctgcctgtgtgtgcctcattcacaccggtggacctgggttgaacatgttcatatttaaaaaccaagagtgaacgcggtgaaatgtacaattcataacactttttcaaagaaaaatctgagccctcaggaagttccaggcttacctctggcaccccggaggctggttcgctctccctgaaaatgtttttagtggaaaggttcaagcagctctgggctaggctgtgtgtgtgtgtgtgtgtgtgtgtgtgtgtgtgtgtgtgtttatgcacctttccaagtgctaaatctcctcccatccatcagcctgtgttctctgaaaagctgacgctcagagggaagaaaaataaaaggactagaatttagaacacattagtgtttggagggaggtgagttgtgcttcctgagctctgtttaccatttcacgagtcaagaagtggtgtatttccttcattcgtttctggaagtctttactgaaggcccagttgttgctagaagttggggtggatggtggcatctgggaaatagaggatgagattcctgccttcaaggaacttagcagttgtatgatgaagcaagagtaaagcgtgcaaaaccctagcaaattaagaacgtaaacaaaggtgtgctacgtaacgtgttacgaaccctaaatgcagtaggaaatcaacccaaaagaaggagctcatcaggcctaacgtagaatgccggcctcccagcagagaaaacttggtgatagaaactgttcttagagtagagaaacaaaatgtatgggcacgcaatggaatattattcaaccttaaaaagaaatgaaattccgatccatgttataacatgggcgaaccttgaaaatactatgttaagtgaaacgagccagacacaaaaagacaaatactatatgattccacttataccaggtacctggaatagtcaaattcgtagagacagaaagtagaatagaggttcccaggagtctggggagaggagaggatggggagttagtgtttaatgcgtacggagtttcagtttgggatgatgaaaacaattctgtagatggagagttctgatggccacacagcagtgtgaatgtacttaatgccactgtacatttaaaagtggctgaaaagggaaatttgacattatgtgtatttatgatagtaaaatgtgtgtgtgtatatatgtatatacacacacatacataaatggatatatatatatgtatgtatgtatgtctgaaacattctcgggccacgctatgaaatgcccataggttgatgttgagctcttccctggaaaagtgaaatacacaggaccacattttgccccctggccctagtgcattgacaaacgggaatcaggaagagctgacagtttcccccagagcccctgaagttatatgtcagctcctacacaccttggtggacatgatcccttcaagctggcatagctctttgcttctttgtaggttaggtcgtgggctgacagcgatcgagctgtgaaaagaggacacccctgattcttgagagatggccagactagtctctgtaggtcattggccagaagcagacttgcttgatatgaggaacgcatactgctctnnnnnnnnnnnnnnnnnnnnagctgacagtttcccccagagcccctgaagttatatgtcagctcctacacaccttgctgtttctgatttcttcaagcttgcaatgctctctgttactttgggggttaggtcgtgggttgtcggggatcgagctgtggaaagagggtccccctgattcttgtgagatggccaggcgagtctctgtggttcattggccaggagcagatagctttgatatgagggacgcatgcggctctgagaaagtcggcctttgttgctccgtctggttgccaaaataaaccagaacgcttcattccaaagagaaagctgagtgaggggcctgacagttttatagggaataaacgtctcagagagtggtatattttaaatactttttccttccaatcgtaagagttgctaaaaacagccagagaggcagtttggctgtaggggggacgtctattgggggtgtccagtgcctgggtaggtttgagaggggagggtgccactggcctgggtccccggtgaccatggccctgcttccttgggctgaatcggggtcctcttccatcccctctgcacactagtcgggctgcgtgccagcattgatctcactgcttccttgtctatagaacctcttgaataaggcccagcttttcctcagctctttatccagagcccctggcagagtcattgggagtgatgcttaagagaggaagggaagaggaaggaaggagcaaaggacaaaggcaggcagatgggtttccagtgggtttccgattcactggtctgtccatgtcctttgaaaagctgtgtcttttctttaacttcaattctgtgtcagggccttccgagccttctgagttttccccaaccttatcttagagtaggttaaatgaagtggcttcattttcatatgacacagttgcacaaattcactaactaaaaaatggaatggaggctcacaggccataaaggtgttgtgaagttattgcaagatacttaacagaagaaagactctagtcatctgttccttatatttatccttttttgtctaagtcacatcaaaactctttgtcacattctttaaaaacaaaaagcaaaaaacaaaactttagattcaggggatccatgtgcggtttgttacgtggatatatcgtgtgatgctgaggtttgggcttcagtcgaacccgtcacccagacagtgtacgcagtacccaatagggagtgtttcaactctcgtccctgtccctagacacattcttaaatattgcccagagaagattccaggatatcccttccttagggtcatcctggcattttacggtcctggttatcagtgagctattaaaaagcagggaggtggaggcgccgtggaagaagtctcagtttcgaccacatgtgtgtgattcatggggtttagcattgtgtgtttctgctccgtagctggaagtgccgccaccctcgccccacatgtcattttcaagcctccactgttacagattctgtcttctgtggactcttcagggcctgtggtcaggaaccttgtgaagtgttgctggaagctgggggtggggaggtggaatagaatcgggggctgatgcctccctctcctgcctcatttttctgtgggcctcatttggtatgcaaggaaataagccaaacagcctgtgaagaaaggaagaatgagatagtttcctaagttgtctctgcctgagttggccgcgggtctggggctcattcagccctttgtccccctgttgagtgcagtgcgtgtgtggtgacaatgaggtggtgcagttacactgagggctaatggtaggagttccgtcagcccattcatggaggcagaggagggtgcagggcgcggagctcgagccagcaagcagaggaagtcagaggcccttgtaacgagctgaagatcacaaacactgctgtgagggctccaggcttgggggcgggggcagccaggagggaagggggcaagggagggggcctatcatcatagaagttggaggtctgcccgacccccagcgcggtagggtaccacctgtccaggctgacagacgagcattatggcttcccttttaatcagcttaatttggggcatcttaacacaatggctggtgctttggaggctgcaggaaagctgatgtcctagagccgccacacttgacatgcgtgtaacaccttttgattagaggcgctttcgtgtttttccagccacttgggctctgtctctttttcttggagattctctggtctgtatgtctttacttagagcttagaagtcgaggtatataggaaaaaggagttctgaaattggaggcttgccctttctaaagccagtctgagctttcagccagatgtcactgggacaagccacgtcaactctccacgctccattccctagctgggaaacgagggcatttggctatttgatttccagaggccctttggacctccaaattctccaagtctgtgattatttgtgtatgtcttcttataatccagcccctttggaagcactaactccactcttctctcagcttgatcctctaatagaagcaacctggttggatttaaggtggaggtcttcctctctccaggtggctgccctcatctctacccccaccccaatcccatgcattctcctgccctcctgctttgggcaagacccaggcgatgtggagttggcatgtccagttgcaggtatcagcaccactgcaccatctcctctgccttcacttcccaccagcacacagaatttatatgcccttcccaagtccaaaaagggcccctgccatgctaaacaaaggtattcatatgcaaggcatgagctctgtctcatggaagggagaggccaagttctctttccaccatcagagagtagcgttcaacatcatttatacaagacaggcttttgcccttttagtcttgctgaactagaatgagggatttgtgtagtcgaaagtcaagctgatcattgtcaagtttcgtggaagtggaacctgaaggaaggttaggtggagactgcagagagggttagcgtcctgccttaccacaaggtaagtctagaagagggtggggaagggagttcagaattcttcattcatggagtgtacctgccttggtcatccttttatcttccagtcagaggggtcatcagtcaagagctggccaggctgggtgtggtggctcatgtctgtaatcctagcactttgggaggccaaggcgggtggatcatctgaggtcaggagttcgagaccagcctgaccaatctggtgaaaccctgtctctattaaaaatacaaaaatcagctgggggtgatggcgtgcacctgtaatcccagctacttgggatgctgagacaggagaattgcttgaacccaggaggtggaggttgcagtgagccgagatcgcaccattgcactccagcctgagtgacagtgagactccgtctcaaaaaacaaaacaaaagctggccgtagtcaagtcagtgatgatttggattgaaattaaaatgtgactaaagagagagtatgcagttttgtctatctatgaaaccttcctctgttttatgtgggacacctgggcacccactcttggctggaacttacataaaacactactgtgcacgcacatgtcacctcaagtcccgtggctctgaaagtccagtagaagtgacagccagacatcccagtcctccctgtagggttttctcagaactgttcctttaaggtctcaggctgctggaagggagggctgatagcagaaaaagtggggacactgggaactccaaagggaagacgcgcatggcctgaaaccgagttctttcgctttctggagcctggtctccctatgtggagggtcatgctggcatggctggcaatggttaattcaccgatggccatggagtcccaagttggccatattattgcggtaaaagatacattaacccagatgaccttgccgggggccagaatagagcccgtgaggaaggagagcaaggcaggatcggccgggaggcgagagggattttgttgaggagcaaggtcttccacaggaactgcgacttggaaagtattcaccaagggctgtgccatgcgaaaccctctttaaaggaaccgcatcgctacgcctaacgggcatttcttttttaatgtaatggttcagagctattgtctaccacgcctcgcgtgcacacgcacacacacgcaagttccctcagtcagccgagaatcctgccatctcttttagataacaaaagctcttaggccttatgctttgggtaggatttgtcttccatggacaggtattcagttggaaacaagtatatagtcactgcctctatggtatggagatactccgatttagtccctctgcctcttggggaaaaaaaaaaaaaattgtaaacatccccttcagcagcttctcaagtccctgtacagtggaggaacattacacgtgaacttcctggattcaatggattcttctttgcaagaaaaaaaacaaaacaaaaaaacagagaaagaagaaaatatcaatttagattgttaggtccaacgtttcactcagtgagtgagcacagggggtgacggaggatggctggaatgtggggttgaagctgctgttctgggtctcagctcctgcccatgtaccgtggagtgagcatctcacaccacgatgattctggcatttaagtgaactccttcacacggtgctcaagtggagaaagggctgtccatgtctatcccagcttagaagaaaaactgatggtatgagacttgccattcctctctgatgtagaacctgcctaagggacattccacagcagttctgaccgttgtcactttgtgccttaacccccacattcattttgattctatatttagtattaaattttttagattattaggatttaaggttttcaaacatctactgaaatgcaagtgcccctagaaacattatactttcaggccgggctcagtggcttatgcctgtaatcccagtacttcgggaggccaaggcgggcagatacctgaggtcaggagttcaagaccagcctggccaatctggtgaaatcccatctcaactataaatacaaaaatcagctgggcgtggtggcacgtgcctataatcccagctgctcgggaggctgaggaaggagaattgcttgaacccgagaggtggaggttgcagtgagccaagattgtgccattgcactccagcctgggcgacagagcaacactctgtctcaaaaaaaaaaaaaaaaaaaaaaaaaaccagaaaagaaaagaaacattataccttaacttttcgcacctagtgagtgataacctatgaggataatgctgccacatggtccttgagggaagaacttggggaagagccgaacagggatgaggcaggtgagccccatgtgatttatcgtcattcattcagctcaacaggtcggacagggtaagggtaagggatgtaaccaggagatgccacaggaacgtctgagaggtgttagcaagtcccagaggccagcgcccgactccatttcagcctcgttcagggtggcacggagactcctgctgctgcgtcacgtctgtcatgttcagcactcttcccagacacacagtcttgactaaagattgtcaggatcttgacacacgcttcattagtcttgactaaatgcgaatctatacctcatttcaaagaaatctgaattctttaggttccaggaccagtttattgttatacataatcacgatcatttattgagctccacttagcactgcacatatatcagtatcatctcagttgccctttactctgattattttgtggggaaactgagatcagaaaagttaaataacttaggtgccacctgcaagtatagtgggtgggcagcagataccacccttcctcatttcattgttccaggtgatatttcgtctctgcctttggcctttagtctgtggttgttcctaatcttagttttcattgaaagctgtagtttgaaatgtgggatagatgagagataggaaaggaaaatttaggggtatggaaattttgttccttagtggttagttccagctttattttgtttatttatatgtttgtttttaaagatcgggagcttgctgtgttgtccaggctggtatcgaactcctggtttcagcttcccgcctcagcctcccagagtgctgggattacaggcatgagccaatatgcctggccagctgtgttttagatctttgggaaataaagagaatgcttttgggcttggcaaaatagaaacctctgggtggggagaattgcacagtaaaagaaacaaaagggaagtttatattaaactatgaaaagacacagggaggttcaatttaacatatttgccttatgtatgtgcttcttaagagagtgcacaaaggcacctttgcagaggagagaggctagaaaatgcccgttagaagcaagtctacggtttgcaccctcttactagcaccagcaacggtccctgtctagtgatacccatgacttgtcattgcattgcatgtcatctgcctaagagaagctcctgcctggggcagacacactgtcaattacccctacaatatagactgatactaaagcaaggctgcatattcttgcttattcccaaattggatggctcaaggttccagaatgttgtagacattctgcattatatctttatgagagttaaggaaatggtaaagaagcagaaaaagttggggatttttttttttaagtatttacagtgaggcgcggtggctcatgcctgtaatcccagcactttgggaggccgatgcgggcggatcacaaggtcaggagttcgaggccagcctggccaatatggtgaaaccctgtctgtactaaaaatacaaaaattagccaggcgcggtggcgggtgcctgtagtcccagctacttgggaggctgaggcaggagaatcgcttgaacccggaaggtggaggttgcagtgagccgagattgtgccagtgcactccagcctgggggacagagtgagaaaaagtatttacagtttatgtgagggtcagtacgttggttcattggcttccttcttatctagttctcgggctgagtttgctaatgtcatagcacttctagtagccttccccttttctctgccacttcccagcttccccaggcagaaagcatctggtcggccccttgattaccaggcatccataagtgaccatcatttaggccagtgcttctcagaatgccaatcacctgggctccactaaaaggcaggttctgaatagctcggcctgggttgactgagattctgcggttccaacaagctcgcaggtgatgctgatgctgccagcccatggaccccacctggagtagtgaggttccttggcactttaagaacatccctcctttacttcacatttatttctactggaaactagcacagacttatgcaagctaaattacgcatgttttctccgtaggatgctctatgtcctgttcctcttactaacaactctggtctggaccattgttctaggattgtctcaaagcttgccaggagcagattgaggcggtgctcctcaatagcctgcagcagtaccgtcaggaccaacgtgacggatccaagtcggaggatgaactggaccaagccagcacccctacagacgtgcgggatatcgacctgtgaggatgccagttgggccgaaagagagagacgcgtccataatctggtctcttcttctttctggttgtttttgttctttgtgttttagggtgaaacttaaaaaaaaaattctgcccccacctagatcatatttaaagatcttttagaagtgagagaaaaaggtcctacgaaaacggaataataaaaagcatttggtgcctatttgaagtacagcataagggaatcccttgtatatgcgaacagttattgtttgattatgtaaaagtaatagtaaaatgcttacaggaaaacctgcagagtagttagagaatatgtatgcctgcaatatgggaacaaattagaggagacttttttttttcatgttatgagctagcacatacacccccttgtagtataatttcaaggaactgtgtacgccatttatggcatgattagattgcaaagcaatgaactcaagaaggaattgaaataaggagggacatgatggggaaggagtacaaaacaatctctcaacatgattgaaccatttgggatggagaagcacctttgctctcagccacctgttactaagtcaggagtgtagttggatctctacattaatgtcctcttgctgtctacagtagctgctacctaaaaaaagatgttttattttgccagttggacacaggtgattggctcctgggtttcatgttctgtgacatcctgcttcttcttccaaatgcagttcattgcagacaccaccatattgctatctaatggggaaatgtagctatgggccataaccaaaactcacatgaaacggaggcagatggagaccaagggtgggatccagaatggagtcttttctgttattgtatttaaaagggtaatgtggccttggcatttcttcttagaaaaaaactaatttttggtgctgattggcatgtctggttcacagtttagcattgttataaaccattccattcgaaaagcactttgaaaaattgttcccgagcgatagatgggatggtttatgcaagtcatgctgaatactcctcccctcttctcttttgccccctcccttcctgcccccagtctgggttactcttcgcttctggtatctggcgttctttggtacacagttctggtgttcctaccaggactcaagagacaccccttcctgctgacattcccatcacaacattcctcagacaagcctgtaaactaaaatctgttaccattctgatggcacagaaggatcttaattcccatctctatacttctcctttggacatggaaagaaaagttattgctggtgcaaagatagatggctgaacatcagggtgtggcattttgttcccttttccgttttttttttttattgttgttgttaattttattgcaaagttgtattcagcgtacttgaatttttcttcctctccacttcttagaggcattcagttagcaaagaggttggagcaacaacttttttttttttttttgcacaattgtaattgacaggtaatgaagctatttgttaaaatatttgcctttttaagtaaaaaagaaaaatcagaacagggctatttgaagaattattttatacacagattctgccttgtttcatagtatgagggttgaagacggaaaacaatctaagggtctctcatttttttaattttgttttgttcagtttggtttttttttttttttgcgctgctaagaagctaaagtcatccatccttattcacgttgacagtacctagctgtaatgtttcacagagtgtgctgctattttataaacatttttataatatattattttactgcttaaattccaagtcctgaagtagatggttgagatatgagttcttcgtactggaaaagcccttccgtagtttgttttcttctggtagcatattcatggttgtttttttttttcttttttggttttttggttttttttttttcctctgatcacattcttcaaagacggagtattctttacctcaggtttactggacaaaatcaataactacaaaaggcaatgattcacgcttttgttttcataatacctcacaaccgtacagtttctgcttgggagcccattcgcatgaggaatacagaagcagtgtgagcagggctgactccctctcaggtggaaggcagggcggtctcactcccagggacctttttggtcatggaggccatcgggctcccagttagaccctggtatcctcatcatgatggaaaaaatacattgaaccaagggatcctccctccccttcaaggcagacgttcagtacaaacatttatgcggtaggctcagatgtcgtaatttgcacttaggtaccaggtgtcaggaaacagactaaaaagaattccaccaggctgtttggagatcctcatcttggagctttttcaaaagcggggcttcatctgcaaagggccctttcatcttgaagtttttcccctccgtctttcccttcccctggcatggacaccttgtgtttaggatcatctctgcaggtttcctaggtctgaatctgcgagtagatgaacctgcagcaagcagcgtttatggtgcttccttctccctcctctgtctcaaactgcgcaggcaagcactatgcaagcccaggccctctgctaagcggtactaaacggtcgggttttcaatcacactgaattggcaggataagaaaaataggtcagataagtatgggatgatagttgaagggaggtgaagaggctgcttctctacagaggtgaaattccagatgagtcagtctcttgggaagtgtgtttagaagggttcaggactttgtgagttagcatgaccctaaaattctaggggatttctggtgggacaatgggtggtgaattctgaagttttggagagggaagtggagcagccagcaagtaagctagccagagttttctcaagagccagctttgctcagcacactctcctgggccccaaggagtcccacggaatggggaaagcgggaaccctggagttcttgggaatcttggagcctaaagagaaaccgaggtgcaaattcatttcatggtgactgacccttgagcttaaacagaagcagcaaatgaaagaaccggacaaataaggaagggcacaagcctacccgactctatttacagtctgtaactttccactcttcctgtagtcccgaggcccctgggtccttctagcttttctctttcccatccttggggccttgtgtgatgatgggtgtggggctgccgatgggaaagtcgggggttgttaggcttttctgcctgctcctgcttaaacacaagaaggaatcctggattttgccctctccttagctcttagtctctttggtaggagttttgttccagaggagctctcccccttggatttgaacttgctctttttgttgttgttgttctttctcttctttttcttacctcccactaaaggggttccaaattatcctggtctttttctaccttgttgtgtttctatctcgtctttacttccatctgtttgtttttttctccatcagtgggggccgagttgttcccccagcctgccaaattttgatccttcccctcttttggccaaatcctagggggaagaaatcctagtatgccaaaaatatatgctaagcataattaaactccatgcgggtccataacagccaagaagcctgcaggagaaagccaagggcagttccctccgcagaacaccccatgcgtgctgagaggcgagctccttgaagaaggggctgttcttccaggaggccttattttgaactgcctcaggaccccactggagagcacagcatgccttactactgggtcatccttggtctatgtgctctgtactggaggctctgttctgcctcttatcagccaggtcaggggcacacatggcttaagtgacaaagccagaggagaagacaaccctgacagcatcacgctgcatcccattgctagcaggattggcaactcttcagacggagctgcgcttccctgcagtctagcacctctagggcctctccagactgtgccctgggagctctgggactgaaaggttaagaacataaggcaggatcagatgactctctccaagagggcaggggaattttctctccatgggccacaggggacagggctgggagaagaaatagacttgcaccttatgtcatgtaaataattgattttctagttcaagaagataatattggtagtgtgggaattggaggtaggaaggggaggaagtctgagtaagccagttggcttctaagccaaaaggattcctctttgtttatctctgagacagtccaaccttgagaatagctttaaaagggaaattaatgctgagatgataaagtccccttaagccaacaaaccctctgtagctatagaatgagtgcaggtttctattggtgtggactcagagcaatttacaagagctgttcatgcagccatccatttgtgcaaaatagggtaagaagattcaagaggatatttattacttcctcataccacatggcttttgatgattctggattctaaacaacccagaatggtcatttcaggcacaacgatactacattcgtgtgtgtctgcttttaaacttggctgggctatcagaccctattctcggctcaggttttgagaagccatcagcaaatgtgtacgtgcatgctgtagctgcagcctgcatcccttcgcctgcagcctactttggggaaataaagtgccttactgactgtagccattacagtatccaatgtcttttgacaggtgcctgtccttgaaaaacaaagtttctatttttatttttaattggtttagttcttaactgctggccaactcttacatccccagcaaatcatcgggccattggattttttccattatgttcatcacccttatatcatgtacctcagatctctctctctctcctctctctcagttatatagtttcttgtcttggacttttttttttcttttctttttctttttttttttgctttaaaacaagtgtgatgccatatcaagtccatgttattctctcacagtgtactctataagaggtgtgggtgtctgtttggtcaggatgttagaaagtgctgataagtagcatgatcagtgtatgcgaaaaggtttttaggaagtatggcaaaaatgttgtattggctatgatggtgacatgatatagtcagctgccttttaagaggtcttatctgttcagtgttaagtgatttaaaaaaataataacctgttttctgactagtttaaagatggatttgaaaatggttttgaatgcaattaggttatgctatttggacaataaactcaccttgacctaaattatctggccgtttttgacttatttataaaccagcagtcctcagaatggaatacacttgtctcatgtcagaactgtttcatgccgctgcaacatttggcagtggcataaaagacacattctaacctggaatggaatctacatgtgcctctgtgttatggcggtacaagtcattgttgacattgctaggggacgaggggtgcccatgcagccagcttataagctagaagcctcagtccaccttcagaaggtgggtacatcacagacactatgactggtcctcagaggatcgtccctgattgttgccagctactcattctgggctgtgaggaagcatctcctggcatgagaggtaccagaagcctgcggtgccatctccagagtctagggagtctctgggaaccctgcccctgcagctttcctggctcctgcctgctgttcttcgtggctcccacctgatttctgatccttcctgcacccctcttctgagacacaggccacaactacctttgctggagtctggagaagcagagcctgggaatgggatgtgacagtctccgtactgctgaaatgaattgccaggccctaggcccagctgctcttggaccttagctcagaccagcttctttcccgagagtgatgggtgtgcagaagacaagggcctaatgaacacttttttgtgtgttttgtttagaaacagggtcttgctgtgtcccccaggttggagtgcagtggcacaatcccagcttgctgcagcctcacactcctgggctcaagcaatcctcctgcctcagcctcccaagtagctgggattacaggcgcccaccaccacgcccagttaatttttttattttttgtacagattttttgtatagctttgttgcacaagctataacagacattttgatgttactgtaaaattaattttttccaaagttccttgtctggaagtcatcgaaggctgttttccattttaattctgacctgagttgtaaacaagatttaaaactggccgttggggaagtccagattaagatattccaggctgatctcaagtaacttcacttaataggacttttaagcttacaaggaccctagaaattcccctttgttcccattccccttgacatccgccattcttagcgacaaatgggggtaacttttttcttgggtttctgcctagtgaagtctgctggcctcctgggagtttcaagggcctctggttgccattcttaaccatccttggaattctctttggcatgacataatgtccaactgggttcctctccctccctttccctatctttttgctctgtaggatcaatgctatatctgtttatagcatgacaactccactccctctctcaaatgccacccagcaacactgctgggcttcccccattctgaacaatggatgttttaagggcgggaagagcagatgaagcacacagccgagcagtgagaaatctgactgtcccatctacgctctttcagacccagatcatcttataactggaaaatctcaaacttggaagtgcctttcctgaaagtggccattaaaaatgcagtgaagacctggaaatccccgatcttttgtgcgtgttcaagggagtgcttttgtatctctaatgactttctaagatttggagcttttatttagtatgcagaggtatccccaaaattcaccttcccagttggcttagcagtaatactgtcaaaatactgacacgaagcaagtactcaaaagctgaatattacaccagattacttccctgctctcctggcaattacagcaacagcaaaaatgctgtggacagagtagggagattcagagtatcaaggtaagcctagtactcacagccgatgtgttatgtggggcctgtactgagcctttaaggaaaagcacagaaaaaaacaggacacacaggcctatgaaatagcagagagaaacaacagcaaatgcaaatgagtctggggggaaatcgatgctaaggtgtgggagggggcccttgcagaggaacaggtttcctcaagcaagtgagttttaggaaaacacttttgttaggaagatcatgtgggtcagcatagtttggaaacggaaacagagtgtgaccttttccaaaaataaaagggatgggaagtaatttttttttaaatgaagggaaaatattccacacaatttaatagattttaaacaatataaacacagatgttaggcttgtgaaacaggataagcacagccacaaacattgatttgggattaccacccacctaatttctcatgaggcttaaagaaagaaggctggacgcttcaatatgactggtggctttccttgtctttgggctctgggggcctccccgtgctggaggggcggattccatccgctcggaccacaggctcagtcaaacagaactgggcggcctgagaaagcaagaccagcgcccctgcctctgtctcattgtccccctgaagctttgagtttatgcttcaagctttgagtttactcattattatggtttctttcatgctgattcgctcggaggaccctggcccttctgctgcgctcaccgccgccgctctggtaaatgactgtccgcatggtttcaacctgcagttcttcctgcgaagtccactaggtggtactaatgccacggacaggatcactcacaaggaaacccagagccagccgggtgtaggttgcctctgccctgcacggaagggaacacctccctccagcagacagcactggagcagcacccccgcctccgccatctccccagggcagcctggggaaggaacgtcaggcctttcccgtccacacctggcgcagttccctcacctgcttctctcactaccgccacatcgtgactccatctggggtggctggtgctggttcatcaccttccctgactcttcagtgactaatccagagatggcacactggcagcttacagaccaaatccagcctgcagacataattagcttgactcccacagtgattgaaactgtcttggatttacttgccaatacaagatgagagctttcacataaaagtcaggattgtaacgactcttgggagatttaagtcctggcaaccacaggcccgcgaggccgcgagggctgcagctgagtgtgactggcccctttctctaccccctgcccaccccacaaccgactgaacccgctgctctcttttacggcgcctgccagtcggcttagggcttacagctctgcagcctaacctgtgtctgttttacctccctggccaggaaggaggagccagtaagtcccaagtggagtcatcctcctccaaccctctccaccacaaacagacctggaatacttctttcagtttgtggaccataacctctccttctcagacgaagaaagaccgtactgcctcagtaagcattaagatctctttatgtctttatgagtttttagttatcagattacccccggggctgggccagatttttgaaattcctttgagatcccaacattcagccccacgcccaggtctgcaggtaggcccaaataaggtggggtggtaaagatctgctttttgttttttggttttcttttcttttgtttctggagatagggtcttcctttgtctctgaggctagagggcagtggcgtgatcacaactcactgcagcctcaacttcccaggctcaagtgatcctcccacctcagcctcccaagtagctgggacaacaggcatgcaccactacatctagattgttttaaaaaatgtgttatagaaacagtgtctcactatgttgccctggctgctctcaaactttgggcctcaaaagatccttcccacctcagcctcccaaagtgctgggttacaggtgtgagccactgtgtccagacagcttttcctgcttttgtttgtctggagagtcatttttagtgctcctggcaccatggagattccatgagaagacaaacctgtgagatttctatatttgttgaaaaagtgcaaatctctgtggctatgtttcggtcaacccattcactgaaaatcgctactcttcatcatccccttcccacacagggctcctgggcactgctcgtttattcaacaaatgagggctgggtacgtgcctggtgctccgtatgggacccctcattcaacaaatgtgtctcagtacttgcttttccagggatgagatctctgctctccttgatctcaaaggctaaagacagagacagataaaaagacaactgctacttggtggttggcccagaatacaagcgctctatgctctgctctggaatgcccccccggccacccactcgctttgtaaccttgggctcattacttagccacccagcaactcacagtaaactcagtgacttagttttttcatctgtgaaatggggttttgtagttttgaaagagctttccacaagcctctcctataatccttttataactctggtgaatttggtaccttgttttgtagctaagtgaatggagggtcacacggctcacttggcttatcacaaagagttaggctaggactggatcccagatgtgtctgaattcaaatatcatgcatcttctgctacactgggctactttattgatccatattttgcttactgagcattgagctgaaagagtgagacttttagcccagtgtgggcaggaaggttgcagggggtggggggggttggatgatgacatcacttagtgaaatcatcaggggatagttttttaatgaagacaaagtcaatgaagaaagtaaagggccttgtcatctaaggaggagtttgtcagtgaatgtacaccaaggaagtagccttttctttccagcgtctttgccttgccccttggctgttcttcatgctcattccattcaggttataaatgcgttgctcataaactcctgggaaggagccatgggttctgctttcctcccaaatccccaaacctatgtcaattaaaacaagaatcacagccaggcgcggtggctcacacctgtaatcccagcactctgggaggccgaggtgggtggatcatgaggtcaggagaacaagaccatcctggctaacatggtgaaaccccatctctactaaaaatacaaaaaattagctgggcgtggtggcatgtgcctgtagttccagctactcgggaggctgaagcaggagaatcacccgaacccaggaggcggaggttgcattgagccgagattgcgccactgccctccagcccgggtgacacagcaagattccatctaaaaaacaaacaaacaaacaaacaaacaaacaaaatcacatatctagtttgtccctattcttcagggacccacgaatatctgtgttattattatttctcccccaacgctccctccttcccccaccaagcccagagaatctcagtccagaggcagggaagccttgcttgtatcatcagcctcccaagcctttgctatttaaagattccttttgttatcctataggaagagatattctttttcttggtttttcgtggccaccttccttgccccgaaaaaagggacacaggaggaagggcccaaaaacgtagaggaaaaatactgtaggaaaaaatgctgattaatatttccaaaaatattattttaccatggatgcaatggcctgaggccctgcaagggtgaatgccacactgagggtcacccagcaatgtacaaatgaacaatgaaggacaactgctggcctctgcaggcttccattcattgctcagctctgtgagcctctggacatcttggtgaataccctcagaaaatcttgaagcaccacaggttttaaaagcagtcactcacttatgtttttcatatgtcactgtaagctcatcatgaagggactatggaagatttgcttccatatggcactgcctaggtattagggccaggacacctaggattttagggcctagcggtcttctcttttccttagcattctgtcagggctctggcaagaacaagaggattggcctttctagccaatgtcccccccagtgcttgctacttgcctggaatattatggactgtatcatacatttctgtattacatacaatcattgtgacagagtcaggatgctgtggtggaaaaaggcttaggtaataagatgatctgactttgaatcccagggctgccacttagctttacaagctctgagtctctgctattcttttataaaatctctctggattattagaaggattaaatgaggtagtctatgtaaagtgcctaatacatagaaagctttaacaagaatcagctagtctgaacatatgcaaacacaccaaggaccgtgttcattgcttttgaaggcattgtagatgcaatgttattttcccaaaaagtcaggggtggaggtggatatgggttttctgtggatcctgatgagactactatcaagagcacagcagtgaaacaaaagcatttacaactctcataatatccccttggtgctgccgcccttcttccagacagcaatgaacttgggcttggggagcgttctcttccccactaagtaacaggctaacaggcaaggcatgaaaagggattagaggatgcatgtattcaaataaaggggagttccccagaagcacggcaggctgagaaggcatctttcgactgtccatcagtaggaaagctgtttgactggcagatataatttttttggaaccagcaataatggggagctattggtgacagatgtcagatgttggcagagcagctgccaaaacaagtctccctccaccttcagacatcaagctgatggggactgggagtcccttcgcacttgggtcattggtcacattattatttctcagttgctggacaaagcagatggtttaccatgtatttgtgattttctgttggcctagaaattctgttcttccatcagggtacagcatgtaatcaattatgacagtgggtggtgcaagaaaatccctgccagtaaaagcccaagactttctcttttattaagtctgcataaaccactacaatttccaacttcaaagcaatagaagaaaaaagcaaagtagtggtgttataaataacttgggtaatcacaaaaaccacagttctcagttggtcccaaacactctcagtctgtactatctgatgtcagttttgtctgtccatttttattctgaaacttaaaatcctcttgtctctattctagtaagtcttaataatatacgtatatttttagacagagtcttgctctgtcacccagtctggagtgcagtggcacgatcttggctcactgtaacctccaccttccaggttcaaacaattctcctgcctcggcctccgaagtagctgggactatcatgcacagctaattttgtatttttagtagagacaggggttcgccatgttggccaggttggtcttaaactcctgacctcaagtgatctgcccgccttggcctcccaaagtgtgccgggattacaggcatgagccactgcaccctgcctctattctggtaagtcttaaagagctttatcttagaatcataaagtgacctaattaaaaataaacagaacaaataccaggaacatactacccctcaactaaggtttttttaaaaaaaaaaattctcagctgtattctattacatagtaaaaatagtaagttgccttgctttagtatgtgtgagtagccacatagaacagtttatatgttctccatcacccaccctctggataattttctttgtgaaagacaccttgcttatttgtatgcatgtgtctcaggaaataaattctttagtaatagagcagaacaagcatttttaacatgataactaccaactagagaaactcttgacataaattacacattttttcttgtcttttaaaaatatgtatgtattttttcttaaaaatcaggctcataaacgaatggctttctactcttttttcatgtaatctcctatcaggggaatgttatcataccattaaatattctgtaagaacatgatttctagggctggacacggtggctcacatctgtaatcccagcgttttgggaggcccaggcaggaggatcaccttaggtcaggagtttgagaccagcctggccaacatggtgaaacccgatctctactaaaaatacaaaaatcagctgggcgtggtggcacatgcctgtaatcccagctatgtgggagctgaggcaggagagttgcttgaaccctggaggcggaggttgcagtaagctgagatggcgccactgcaccccagcctgggtgacagagaagactccgtctcaaaaaaaaaaaaaaaaaaaaaaaaggaaacaaaccaaaaaaaaaaaaagaaaaaaaaccatagattctaatgaattgtttgggctcctacaatatatctagtactacttgaggtgctgaagacacagaagggaacaagccagtccccacggtcaaggaatatatatcctgctgaagaaagacaagcaatgaacctacaaaaatgttcataaatgatataatttcagaataaaatcggatgatggatagtgactgggcagcctactttgcttgagggaagacctcttgagagtgggacttctgagttgatacctgaaggctgagaaggaggcagccatgcaaatatcttgggaaagagctctgtgagcagaaggaacagagaatgcaaagatccggaggtaggaatgagcatgacgtggtctacgaacagagagaagccctgacggctggagctggatgaggaggggcagcgaagagagaattgtaactggagggccaagaggggccatgccacataggccttgcaggagttgggacttcattctaactgcaatgagaattcaatagagaattctccagcaagggagtgacacaatagggacatctcttcaatggctgagtaccagagtagaggcagcagagctatgccaacaggctatcacagtaatccagacgagaggtgatgaaggctcagcctgggacacagtgagactccagaagtggtggattcaggacataatttggtgatagaccccataaactttttttaaaggttttggatagatagcttttatcatttatttattattgaagatatgtacgacacaataaataagcttgcttcagacgtatatatagaactctgtatccaataatgagtgaatccacattcttcacaaggacacacgaaacatttctgtgaaatgcctgtggactagtccacaaagcaagtctctgtaaatttcaaaaatgtatacccttgaaaatctctgaagtcctggagatttaagtctgcaactatcttagtcttactaccaagaatagcccctaaggaaaaaaaaaaaccctttcaataaaaaaaagataaacaagaataatataaatttcacagactccagctaaccagcttttggtcacaatgtaattaatttcattcttaatgcattgctgaaaatatttaaatgcctggggaactggctccaacccacaatctcctcccctaccctacattccaaatagatcaggcattttacacttggctcatcttcagtgaagacagtaattaatctttatttgaaaacaagatttgggaggcagacgcaggcagatcacctgaggtcaggcgtttgagaccagcctggccaacatggtgaaaccccatttctactaaaaatatagaaaaattagctgggcgtggtggcgggtacctgtaatcccagctactcaggagcctggggcagaagaatcgcttgaacctgggaggtggaggtttcagtgagctgagatcacgccactgcactccagcctgggtgacggagcaagactctgtcttaaaaaaaaaaaaaaaaaaaaaaaaaaaggcaggaaaacgagtaaaatccagcactcactgcattattgagcctacagaaatctatgatgaatttgacagggaatattaggataggtaaagaatcaagggtttcatgagcagtcaagtggagggtgttaccatttac

SEQ ID NO: 1286 - DNA, 6478 bp, Homo sapiens
agagcgagcaggggagagcgagaccagttttaaggggaggaccggtgcgagtaaggcagccccgaggctctgctcgcccaccacccaatcctcgcctcccttctgctccaccttctctctctgccctcacctctcccccgaaaaccccctatttagccaaaggaaggaggtcaggggaacgctctcccctccccttccaaaaaacaaaaacagaaaaacccttttccaggccggggaaagcaggagggagaggggccgccgggctggccatggagctgctgtgccacgaggtggacccggtccgcagggccgtgcgggaccgcaacctgctccgagacgaccgcgtcctgcagaacctgctcaccatcgaggagcgctaccttccgcagtgctcctacttcaagtgcgtgcagaaggacatccaaccctacatgcgcagaatggtggccacctggatgctggaggtctgtgaggaacagaagtgcgaagaagaggtcttccctctggccatgaattacctggaccgtttcttggctggggtcccgactccgaagtcccatctgcaactcctgggtgctgtctgcatgttcctggcctccaaactcaaagagaccagcccgctgaccgcggagaagctgtgcatttacaccgacaactccatcaagcctcaggagctgctggagtgggaactggtggtgctggggaagttgaagtggaacctggcagctgtcactcctcatgacttcattgagcacatcttgcgcaagctgccccagcagcgggagaagctgtctctgatccgcaagcatgctcagaccttcattgctctgtgtgccaccgactttaagtttgccatgtacccaccgtcgatgatcgcaactggaagtgtgggagcagccatctgtgggctccagcaggatgaggaagtgagctcgctcacttgtgatgccctgactgagctgctggctaagatcaccaacacagacgtggattgtctcaaagcttgccaggagcagattgaggcggtgctcctcaatagcctgcagcagtaccgtcaggaccaacgtgacggatccaagtcggaggatgaactggaccaagccagcacccctacagacgtgcgggatatcgacctgtgaggatgccagttgggccgaaagagagagacgcgtccataatctggtctcttcttctttctggttgtttttgttctttgtgttttagggtgaaacttaaaaaaaaaattctgcccccacctagatcatatttaaagatcttttagaagtgagagaaaaaggtcctacgaaaacggaataataaaaagcatttggtgcctatttgaagtacagcataagggaatcccttgtatatgcgaacagttattgtttgattatgtaaaagtaatagtaaaatgcttacaggaaaacctgcagagtagttagagaatatgtatgcctgcaatatgggaacaaattagaggagactttttttttcatgttatgagctagcacatacacccccttgtagtataatttcaaggaactgtgtacgccatttatggcatgattagattgcaaagcaatgaactcaagaaggaattgaaataaggagggacatgatggggaaggagtacaaaacaatctctcaacatgattgaaccatttgggatggagaagcacctttgctctcagccacctgttactaagtcaggagtgtagttggatctctacattaatgtcctcttgctgtctacagtagctgctacctaaaaaaagatgttttattttgccagttggacacaggtgattggctcctgggtttcatgttctgtgacatcctgcttcttcttccaaatgcagttcattgcagacaccaccatattgctatctaatggggaaatgtagctatgggccataaccaaaactcacatgaaacggaggcagatggagaccaagggtgggatccagaatggagtcttttctgttattgtatttaaaagggtaatgtggccttggcatttcttcttagaaaaaaactaatttttggtgctgattggcatgtctggttcacagtttagcattgttataaaccattccattcgaaaagcactttgaaaaattgttcccgagcgatagatgggatggtttatgcaagtcatgctgaatactcctcccctcttctcttttgccccctcccttcctgcccccagtctgggttactcttcgcttctggtatctggcgttctttggtacacagttctggtgttcctaccaggactcaagagacaccccttcctgctgacattcccatcacaacattcctcagacaagcctgtaaactaaaatctgttaccatctgatggcacagaaggatcttaattcccatctctatacttctcctttggacatggaaagaaaagttattgctggtgcaaagatagatggctgaacatcagggtgtggcattttgttcccttttccgttttttttttttttattgttgttgttaattttattgcaaagttgtattcagcgtacttgaatttttcttcctctccacttcttagaggcattcagttagcaaagaggttggagcaacaactttttttttttttttttgcacaattgtaattgacaggtaatgaagctatttgttaaaatatttgcctttttaagtaaaaaagaaaaatcagaacagggctatttgaagaattattttatacacagattctgccttgtttcatagtatgagggttgaagacggaaaacaatctaagggtctctcatttttttaattttgttttgttcagtttggtttttttttttttttgcgctgctaagaagctaaagtcatccatccttattcacgttgacagtacctagctgtaatgtttcacagagtgtgctgctattttataaacatttttataatatattattttactgcttaaattccaagtcctgaagtagatggttgagatatgagttcttcgtactggaaaagcccttccgtagtttgttttcttctggtagcatattcatggttgtttttttttttcttttttggttttttggttttttttttttcctctgatcacattcttcaaagacggagtattcttacctcaggtttactggacaaaatcaataactacaaaaggcaatgattcacgcttttgttttcataatacctcacaaccgtacagtttctgcttgggagcccattcgcatgaggaatacagaagcagtgtgagcagggctgactccctctcaggtggaaggcagggcggtctcactcccagggacctttttggtcatggaggccatcgggctcccagttagaccctggtatcctcatcatgatggaaaaaatacattgaaccaagggatcctccctccccttcaaggcagacgttcagtacaaacatttatgcggtaggctcagatgtcgtaatttgcacttaggtaccaggtgtcaggaaacagactaaaaagaattccaccaggctgtttggagatcctcatcttggagctttttcaaaagcggggcttcatctgcaaagggccctttcatcttgaagtttttcccctccgtctttcccctcccctggcatggacaccttgtgtttaggatcatctctgcaggtttcctaggtctgaatctgcgagtagatgaacctgcagcaagcagcgtttatggtgcttccttctccctcctctgtctcaaactgcgcaggcaagcactatgcaagcccaggccctctgctgagcggtactaaacggtcgggttttcaatcacactgaattggcaggataagaaaaataggtcagataagtatgggatgatagttgaagggaggtgaagaggctgcttctctacagaggtgaaattccagatgagtcagtctcttgggaagtgtgtttagaagggttcaggactttgtgagttagcatgaccctaaaattctaggggatttctggtgggacaatgggtggtgaattttgaagttttggagagggaagtggagcagccagcaagtaagctagccagagttttctcaagagccagctttgctcagcacactctcctgggccccaaggagtcccacggaatggggaaagtgggaaccctggagttcttgggaatcttggagcctaaagagaaaccgaggtgcaaattcatttcatggtgactgacccttgagcttaaacagaagcagcaaatgaaagaaccggacaaataaggaagggcacaagcctacccgactctatttacagtctgtaactttccactcttcctgtagtcccgaggcccctgggtccttctagcttttctctttcccatccttggggccttgtgtgatgatgggtgtggggctgccgatgggaaagtcgggggttgttaggcttttctgcctgctcctgcttaaacacaagaaggaatcctggattttgccctctccttagctcttagtctctttggtaggagttttgttccagaggagctctcccccttggatttgaacttgctctttttgttgttgttgttctttctcttctttttcttacctcccactaaaggggttccaaattatcctggtctttttctaccttgttgtgtttctatctcgtctttacttccatctgtttgtttttttctccatcagtgggggccgagttgttcccccagcctgccaaattttgatccttcccctcttttggccaaatcctagggggaagaaatcctagtatgccaaaaatatatgctaagcataattaaactccatgcgggtccataacagccaagaagcctgcaggagaaagccaagggcagttccctccgcagaacaccccatgcgtgctgagaggcgagctccttgaagaaggggctgttcttccaggaggccttattttgaactgcctcaggaccccactggagagcacagcatgccttactactgggtcatccttggtctatgtgctctgtactggaggctctgttctgcctcttatcagccaggtcaggggcacacatggcttaagtgacaaagccagaggagaagacaaccctgacagcatcacgctgcatcccattgctagcaggattggcaactcttcagacggagctgcgcttccctgcagtctagcacctctagggcctctccagactgtgccctgggagctctgggactgaaaggttaagaacataaggcaggatcagatgactctctccaagagggcaggggaattttctctccatgggccacaggggacagggctgggagaagaaatagacttgcaccttatgtcatgtaaataattgattttctagttcaagaagataatattggtagtgtgggaattggaggtaggaaggggaggaagtctgagtaagccagttggcttctaagccaaaaggattcctctttgtttatctctgagacagtccaaccttgagaatagctttaaaagggaaattaatgctgagatgataaagtccccttaagccaacaaaccctctgtagctatagaatgagtgcaggtttctattggtgtggactcagagcaatttacaagagctgttcatgcagccatccatttgtgcaaaatagggtaagaagattcaagaggatatttattacttcctcataccacatggcttttgatgattctggattctaaacaacccagaatggtcatttcaggcacaacgatactacattcgtgtgtgtctgcttttaaacttggctgggctatcagaccctattctcggctcaggttttgagaagccatcagcaaatgtgtacgtgcatgctgtagctgcagcctgcatcccttcgcctgcagcctactttggggaaataaagtgccttactgactgtagccattacagtatccaatgtcttttgacaggtgcctgtccttgaaaaacaaagtttctatttttatttttaattggtttagttcttaactgctggccaactcttacatccccagcaaatcatcgggccattggattttttccattatgttcatcacccttatatcatgtacctcagatctctctctctctcctctctctcagttatatagtttcttgtcttggactttttttttcttttctttttctttttttttttgctttaaaacaagtgtgatgccatatcaagtccatgttattctctcacagtgtactctataagaggtgtgggtgtctgtttggtcaggatgttagaaagtgctgataagtagcatgatcagtgtatgcgaaaaggtttttaggaagtatggcaaaaatgttgtattggctatgatggtgacatgatatagtcagctgccttttaagaggtcttatctgttcagtgttaagtgatttaaaaaaataataacctgttttctgactagtttaaagatggatttgaaaatggttttgaatgcaattaggttatgctatttggacaataaactcaccttgacct

SEQ ID NO: 1287 - DNA, 870 bp, Homo sapiens
atggagctgctgtgccacgaggtggacccggtccgcagggccgtgcgggaccgcaacctgctccgagacgaccgcgtcctgcagaacctgctcaccatcgaggagcgctaccttccgcagtgctcctacttcaagtgcgtgcagaaggacatccaaccctacatgcgcagaatggtggccacctggatgctggaggtctgtgaggaacagaagtgcgaagaagaggtcttccctctggccatgaattacctggaccgtttcttggctggggtcccgactccgaagtcccatctgcaactcctgggtgctgtctgcatgttcctggcctccaaactcaaagagaccagcccgctgaccgcggagaagctgtgcatttacaccgacaactccatcaagcctcaggagctgctggagtgggaactggtggtgctggggaagttgaagtggaacctggcagctgtcactcctcatgacttcattgagcacatcttgcgcaagctgccccagcagcgggagaagctgtctctgatccgcaagcatgctcagaccttcattgctctgtgtgccaccgactttaagtttgccatgtacccaccgtcgatgatcgcaactggaagtgtgggagcagccatctgtgggctccagcaggatgaggaagtgagctcgctcacttgtgatgccctgactgagctgctggctaagatcaccaacacagacgtggattgtctcaaagcttgccaggagcagattgaggcggtgctcctcaatagcctgcagcagtaccgtcaggaccaacgtgacggatccaagtcggaggatgaactggaccaagccagcacccctacagacgtgcgggatatcgacctgtga

SEQ ID NO: 1288 - DNA, 55996 bp, Mus musculus
  misc_feature (29253)..(29272): "n" at positions 29253 through 29272 can be any base.
  misc_feature (31023)..(31239): "n" at positions 31023 through 31239 can be any base.
  misc_feature (42691)..(42710): "n" at positions 42691 through 42710 can be any base.
  misc_feature (46987)..(47006): "n" at positions 46987 through 47006 can be any base.
  misc_feature (48271)..(48290): "n" at positons 48271 through 48290 can be any base.
  misc_feature (50692)..(50711): "n" at positions 50692 through 50711 can be any base.
  misc_feature (53136)..(53155): "n" at positions 53136 through 53155 can be any base.
  misc_feature (55549)..(55568): "n" at positons 55549 through 55568 can be any base.
gtagagattaggacagctattttctgaagcttaaaagaggaatacaaaagtaaattaaaataatagcagaacagcaaaggcaatcatcttacgttcctgagctagagagggagatagcccagataaacacagtgcaccaatgttggtaactgtatgcaacctagaaaagatgtcggtgaagcacacagtcttgagaaagccatttgtgaaatgataatgaaaggtcagcgtacaaggaaaaccatcttggagctgagatggaaggaaggaccatccagagactgccccacccggggatccatcccataaacagccaccaaacgcagacactattgtacatgccaacaagattttgctgacaggaccctgaaatagctctctcttgtgaggctatgcaaatacagaagtggatgctcacagtcatctattggatggaacacagggcccccaatgaaggaactagagaaagttcccaaggagctgaaggggtctgcaaccctctaggaggaacaaaaatatgaactaaccagtacccctagagctcatgtctttagctgcatatgtagcagaagatggcctagttggccatcgttgggaggagaggcccttggtcttgcgaagattatatgcccccagtacaggggaatgccagggtcaggaagcaggagtgggtgggttggggagcagggcgggggaagggtataggggactttcgggatagcatttgaaatgtaaatgaagaaaatgcctaattagaaaaaaagaaaaaccataatcaaatcattagtatttaacaggcttccattcactgagggagaaaactgggactgagaaggttaaatactatgctcagctagtgaaataattgaattagaacacaagtccctttggtctgtcctcagaggaagaaaacattcccatgaacagggacacaggcagtctaacaaagggaaccttccagcttctttctccctgctcccggtgcaccacccagctatcccactctctctgtaagtgactaatgctcccttctacagaaaactgtctgtacacctgtctctgctttgactaaagtgccctacactctaacctaggcccgggctctgttgtcttctctcccaactccaactccatgatacctttttaactccacagatctcacttcagtcttcccttcttgccctccagtgtctccttctagcttcccctcagcatctgctgacagggaaaggctgtgcaggcagagggtacctatccccctctacgggaactgcatgggctgtcagagataaactccctcagtccccctcacccactcacacctcactgccccagcaatttctctcacatcacctctcatccagggccctagaccagctttggtagtcttagtttgtcatttggggatagtccacaggctaatgctgagagtatggactatgccttataccaacccttccagagggacagtgtctttctggtagggagtgatctggaaaacagttttagtggtatgcaggcaagtattttacttcatatttatttttgtaggtattttctattttttggtaaggaatgttgacttttccattttcgactatcacgtgatgtcttattttaagaataaaatgagtggggaaacaagtaagttgattgttaaaaatacattttactggaacatgtctttaatatatactgtggtcaattgtgcgatgtacacacatgtgtgggcaaaacactcgtgcacattaaataagtaaatctgaaaggaaagaagaagaaataagtgatgtgagcttcacattttgtcgtcaggtggccagttgtcctttttagccaggcctcctgatgattacagaaagatgatgcttctatcagttgggcatatggtatggatacttacccatatggatggcttatgctgagtaatttatagtcagcccgtcagccaatctttcccaacagaggcggcacaggacgatcatgtcttaagtagtgcctacctgagactaaaccccatcaacagcaggtgagcgctcatgaagacaatgcttctcattcctctgcatgccagtacatgcatggagtcctggaatgtctctgtgtttagtgcagtctcatatacagaaatggcaggggcaggatgctcacctgggtgttgaagtctggggctgcagaaaagctatttcccccacctgtctgctgcagccccttcccgccacctctctccctgctagctgcatctcagtttctgaatgttcttctcattatcatttccatgttattggatcacaaggatcttggtgtgctggttttcatggtaggagaatttggaagattgaatagcttctttcacatctcaggggctgggcattcagccctcatctgtcaggctctggggaacttttctttgggccgtgctgtcccttcaggacatgcttgtacacaaagaagctcaggaaaggacacagaatccagctaatttatcttcacatagtttgacttgtaaagccatggtgggactaacaatgtgtactttggatctggctttcagttatgctaaatacattgcaagcaaacatagtctcttcatcctgtgggaaatataatcttccaaaggtgaaaatgcctgtatgatcctcactgcagattacttgcaaagttaaagttcttccttttccctgtctatgaacataaatacatttttttttcacaactgagattttattgaggagcagtgtacacagacattttaatttttttttgtttgtttgttttcaagacagggcttctctgtatagccctggctgtcctggaactcactttgtagaccaggctggcctcgaactcagaaatccgcctgtctctgcctcccaagtgctgggatcaaagttgtgcaccaccactggctggctagacattccaattcttaacacacatacccaaactttgaagagatgtatatttattatgttcacgtaccctaactctgaagagtcacatcgtgttcatgtacacaaatgaagagccacgccacgtattgtttctcgttgaacttattccagttcctgcctcaaacttggcaagtttccttaagacctcacatgacacacacacaacatacacaaaatttctgtctttcacagcacattatcacaactgttagggaaatggactcccacgaccacagacattacagttctgacaggggaaggaacaaggagtggtttccttaggaaacagttctattagagacaggagaccagatattactgaaaatattccagacatgaatgcatgactgagactccaaattgccatttagtatgctttgtattgtaggatatgaaactagacccttctacagaatgttatagtgaccctggagacagtcatagcctctcctgattcaataccctgctattttctggttgtaccaaaaaaaaaaaaatttacacttttaaaatgggatgaggtgggattccctcaccttttaaaaatgtttctagagctactataaaattcgcgtttacaaaatcgttgataaaacgattcctcctgattgtacaagaagggaggggcgaggacgaatgacagatgtgatgaatgctagatcagtcttggcttctttctcttcgtctgaggctggactatggttttctgtctcttccttttctgcaggcagatctatagtttgctggtcactttgcctcttgctctcctcttcccttttgttgacatttttttttttggctgatttggcagcctttttaagcttcccgtccaccttggcaggggaaagcttggtctacagccacagagcagagcttgggcttggctcttcatcctcgctaaccttcctcttgagcatcgtggcggcgctgcgtggaagatgcgtgcaacggacagagctacactgcctagccaccaccacaggaactcctgtgacccccgaaatacattttttattggtcaatagaaaatctgatacgtcctttggtcagtgtaagcaatgatgccctctagtgacagaagatttattttgtagagactctctgtgtcttaaaggtaccatctaggcaattttccttatttaactctgaaaacaaaatagcaaacattaagcaattacttttggtaaaaagggacttcttacactaaccataagttttaatagcacacgaagaaacttagagttgtaagaatctagcttttacaaaaactgagaatttactggttaggcagtgtggggaggccaagtttcaatcctaaagataagtcattcaggggtcaggtggagccccaggccccacctctccatgtgacatcctctcagtgtgagtgagcttcaatctgtcaaaccacggggctttctccacaaccaactgtaccaacagtgcatctcatgagtatgtttatccaatgtcaaatccagagagaaagagtttgtgtctcagttgcttccagcaaatgatgccaaggttaattccaatggaatgtgatatgttgtttttcttggccaagcagagtccctggttctacatttggtgtcaactttgctgttatggttaatattatctgtcacattgtctagactgtggtgcccgaatatttagtcaatcacggttcatgtttctgtgatactctattttgtatgaaattcaaactaaatccacaggctttttgtaaaattatggcccttaacaatgtgactaggtgtcctccaagaaactcatgaaaaagcctgactatgattgagaaagggaggagtcctaccagcctttggatttgaactacaaccctttcatgagtctctatctggtcaatatgcactataggttctaggcacatcacactaggcaatcatgtgaaccaattccagaagatgtatcatctctgtatcacttctccagccatccatttatcctctattctagtgatcctgtttctcgtcccctggaaagcactgacttaaaagagccactcatgggggctagagagatggagcagcagttaagagcattgactgctcttccagaggtcctgagttcaattcccagcaaccacatggtggctcacaaccatctgtaatgggatccgacaccgtcttctggtgtgtctgaagacagctttagtgtattcacatacataaaataaataaataaataaataaataaataaataaataaataaatctttaaaaaaaaacaacactcttatcagatagtcaaggacagaggggttgagcagtttttctagacccatcctggaagtctcattactaggaaggaggagaaaagatgtagggttaaataaaagtcatggatgtcctctacagttggagactattaaatcaacttattgctatttagttaaagcagtttggctggcagcaatattttaaaatattagctccattaaggaaagaatagaaatattgtctgtagtgaaaagttaaaatgtttctacctattaagtttttacagtcacttatgtatgtgaatagtatgcaatctatccagaaagccgtgctatctgtgtacagtagaaggatactttaactcgcatggtttggtttgagtaagccaggatgactatccagagcactcctcacctccagtggcatgcctggagctatataaaagaacacatttctaagagctgaggagcaagctcagtgggaaagattgctcggtgtgcaagcatgactgctcgagttcagatccccagcaaccactgaaaaagccaggcatggcctcctcttgtaactccagatctgtctggggacagagataagaggatttctcagactttctgggccaccaaggcaggttaggtgacagaacatcaagctccaggttcaatgacagaacctgtctcaaaggaataaggcagacagtaatagaatgacactacatgacattcatggatgcacatttgcacacacatacaccatttgggtttggtttcgtttattgcacttgaaaggatgataacttttcaaaatgtattgttaggataaaaataacctatagaaatacttactgccttaatttgccttctgtcattgtgataaaacatttatccaaagcgatttagggaggaaagagtttatttcatcttatctataacaactcccaggtcaccatccatcactgagaaaagtcagggcaagaacccggagcagaagccaggaaaaaccactgctcacctccttgctctccttggcttgcttagcttactgtgttatacaactcacagccacttgcctaggggtggcaccgctcaccctcccatgccaatcagcaatccataaaatgcccacaggctatctgatggaagcaactcctcggccgagagtccctcttgccaggttactgtgtttgtgtcaagctgacaaaaactaaccagtgaaaatacccaaagtggcctcctcagagtgtcaacaaggtttactcactcaatagatattcctccaaaggttccatcagaaagaacttcagggtacggcatgtgtactcacctccgcttagatgatacagtatatgttagcatattacagactatgagaaatcacagattaggatactctaagcattttttttgttttatgattattgtgtgtgtatgtatagtgtgtggcatagttaaaagctgtggaggtcagaagacaccctttaagagttggctttcactttctggtgtaggtctggatgatgaattcaggctgtctgcatttcctgttaagtgcctttaaataatccctcaccctgccaagttaaaaggtactaagaatgaattttatgattcagtgaagttgctgactcaagtttatactcaagagctgttgattttacctagagcttatgctccacacacccccaactcccccctctttctcctccttccccctttctcttctcttctcttctcttctcttctcttctcttctcttcttttttcttcctttccttttgcatggaacttttcatttcaaattgttcttcctttcctttcaattttagaatagttgtattaggggcacagcctgaggcttcttcatggcagcaacaacctacaggaagatgaagcaaaggggggtgggggaggggtagggtgggggtggggtgggtataagtttagtgacagctgccaaacagaatgaacagaacgcctacaggaaggagaggaaggagggtgacaatctagattcagagcacttttaaaaacacctgcagaagacaatgctgcaggatgtccccccactctctctctctctctctctctctctctctctctctctctctctctctctccattctgtgtgtgtgtgtgtatttgtatattcttaattagatagatcctccagggaggaaaagaagtagaaacagaagctgagcgagcgatcagtggattttgcagaccttctgacccatagaggtggagtccagaaactgcttcatgaacaggaaactcttggtgctgaccttgaacaaacttacttaccttctcggtgaacaagcggtttttaacctacagggctggaccaccgtagagctcacatatcagataccctgcatagcagatattcacattacgattcacaacggcagcaaagttacagttgggatgtagcaacgagatagcatcatagttgagcgttgccatagcatgaactgtattagagggtccagcattagcgagggtgagtaccactgctctagaatgttcgcacgacactaaagtgctacctacttttccaaaacaaaagtgactttgagatgcattcattaactagcagtaaagaagtataagaattttttttaacgaaaattggtcaggaaataatccgtaacaaaaggaggaagtaataatgtctaacacagcaggtgagggttttcccttttactgaaaatagacttctctttttgatagatttatatcctgactatggtcccctaactcttttcaccccagctcttttctaccttccatcctatccagatattccctttctgtcttgctcaaaaacaaactggcttctaaggaataatacaaaaagaaacagaactaacacaccgcaattggatgaaacaaacagaagaaaaagaagcccaagagctggcacacaaaacagagacaagctcatgtgcacactcagggatcccttaaaaacactaaatttgaaggcataaatgcatatgcaaaggacctgttgcagacccatgcaggcctgcacatgctgccccagtctctgtgaggtcatgtgagctttgatcttgttgacttggaaggccttgttttcttggtcttgtccatcccctctgggtctcagactcttcctgcctcctcctcttggggttccctgagcactgaggggagggatttgatggagacatctcatttagggctgagtgttccagtatctttctctctctgaataatatttggctgtggatctccgtattaggagttattttattataatgtatgtgttgtttgtttgtttttataacatacatatttgtttttttccctaggtccctgggctatctagtctcaggttcttgggtagcgtcaggtttatgttctatcttgtggagtggggctaaagtcaaatccagtattgatgggttgctcccacaaactttgtgccactatatgcactagctcatctctctagcaggacaccatcatagatcaaaggctttggggtagaggtgaggtttacctttctcctttagtagcatgcagaatatcttccagtaccaaagatgttggcatgtagggatgaaggctctatgtaggcactttcttcttgctctcaacttctctatattcaatgagttgtgtgggtctcagtttgtggggagcaatctatagtcttggcaacaggctgcattgtttggggactcccatgcaactctttttggccaacgattcaattagatgcaaccccatccaggaaaggaaaacttcatttgatgacaagagatgttcacttgtggctctgtctccccccattatttggctatagatcaccttcatgtatgcttatactttaggaagactctgctaggtttccatacctctcaaatgccctttaattttagctgtctctccctgtattcccattcatcgtcttcctttcccctcccccacttgatcttcccatcataactacctattttattcctcttccttaataagatctttctgtcccctcccctagtcccttactctatatctaacccccgtggttctaaagattctggcttggtccctgagttaactgctgtgttatttgtcatagtcatttaccttcattctccatttgggaaacgaagccagggacattcccctcatcaggatcccaaagcctattatctctacctctgctgtggtgattgtcacttcatgtatcatatatgagctctgtggagggacctccctcatcagaatcctagggtgtgtacctcctctgtggtaattaccattcagaggccccagaagccccagcagacctgtcactgacaaaatattgaaagtgaaggcaaaatggtctttgtctccagcaatcagccaaagtccaattcaatacagagttcagaattccttccagggtgagcagcaggcagaaaaaaaaatctcacttgacctgagggtgtgactgtggaagcgcccaggatggggaatgcccatttatgcaatcaagccctgcttggggccccttctttcccccgccccccacccccaccccgctcaggccgcctgtgcagtggtgagtcagtgggtttccccgggagaccagcagaactttctcgcaacccttggggctttacgaagattgtgtttggtccctcaaaagaaaaaaagtgacatacacgtgttcaaagcgatttctgggaagacctgaataggagcgaagcggtttgtgcgtgccagggggcgggcctaggcaaagtacatacccagaggcagtctagagctggtgggtggggccgcaggctgcccacacaggccgcccgctgttttcccttgctgcagacatgctgtggatctgggctgtcctgcctctggtaagctttgggacgcctgggatgtgggacgctgcatactggggaccaccacatgagattccagatgtggctggcattgggtgccaccggtccagatgtttagaaacgcaggggagctgctttcgctcttggctaagtgctcagggctgaagcccaagtccagcgtttttctggaaaaagtttgggtcggggcggggggcgggggcgacggtcagagcttggtgctggccagctcttggatcgatcgctttagtatggctggagagggactctggcttatagacttgcccagacacttttctagtgccactttagggcactagaaaagttcgctccgaggctccctggcatttgacacttctgacagttcgctcaaccgggaagtgagttactctgggctgtatttacaagccaagcattagatcataaaatttctcaaagtaactttgtctgcgaagatttgtttactctcctgtaacaacacgggaaacaaaaaaaaccttcccttccgggaattgagctgtcaaattgtggatggctgaactggtggatatttttatattgtttgtactgtttcttctgttaccctctttctgctggcactctcacagcagatttgtcccagtaaccctagggctctgagtcccagctcctccttgtctgctgcaggcacagaagtaagaactctccagcattcggtctcttcagaaatgcctgttaataaatgccagtccgagggattcgaccctccgaggttcaatccagttctgaatttagaaagattgctttatcaggtccctaaaaatttgccgggcacaaggatctcaaatcggttttcacagcagtggtagaagggaggaagacaacctctccttacttttacaaggttaaaagaggttccgagagcttaagcatttaacagaggtcacacagctagcaaatgacagtgccgggcttcaattgagatctaactccaaggggcatgtacatacacacacacacacacacacacacacacacacacacacacacacacacactactgccccatggtatggttaagagaaaggtttttattgtggatataaaagagaaaatggccagaggcatctggaagagcccagaacatagagagaaagaagtaaactgaacatggccagcagactcgaccagggctatctgagagagagagagagagagagagagagagagagagagagagagagagagagagagagagagatggagcagaggctagagaatagagaaaaccgagcgagagaagcaggcgcagaggtgagagaacagagtgagaagagcagagagagcaggtttttaggttaaatgagtcgctagtggatgggaagcccaggagctggagggagcttgagtaggggtggcagtgagcaggactagcatgcactttgaaatgtgcaacaggcacttgtggtccaagtatgtgctttgatgtgctggttaataggcactacaggtagtctcctatgtcccatctgccagaggtaagggaaatgactttccaatggatcagaggaggcacatttagtcaaatccttaatacaagcaaaccagataatctgacaacatggtgcagagactgtttgcttggcagggcatgtacaaacatgtcatcttgaagggtttttttttcctagcgattcttttccacaacctgatttactgacctccatccctaccctagatccatattgttcttcccctagaagggacagcctgcaggtgaggaatattctgaatgggaagagcccatggttagagataggagcaagctctaagagcaaactgagagagagagagagagagagagagagagagagagagagagagagagcaggcagggagacatcctttagaagcacagtcatggggagtggaagaggcttagggaaacaccatcagagagaggaatctaatctcttagaggcccaggggtgcatacagaaatgcctgatgtacctgcaggtctcaaagagcaggttccagtgagacaccatgagggatagatacaagcaagcatctcctaggggaaggagaagagagacaagcagttagacagccttagagacacagtaagcttcaggagggagctacctgagagacagacctaaggaggcagctggaagcagagagaggaaatggacaagctagacagagcaagctccggggtggagctcagaacatgggagggagaacagggtgagagaggaaatcagcaagtctcttggtgacaagaatttcaattctggacatccgcaagtggtcagggtgtccccaagtgggccaagacacttgtcagagagaaatgtccaaaaatcacaaaggataggcatctctttcatgtaatggggtcccagtagggagagagaagctgtctgataaaccagcatgacttctgtagcaacagacagagaaggaggcttcaaggaggaaataggtagaagtaaaaagccgctgaagaagcggggctctaaaatttggagttggacctggtaagtgtcagaaaccagaagaaacaagtattctataccttagaagagtcaagtcagaagcttggtttgcttaggagaagctgagccccttgttgggcaccagctatataaactgtgacatgacttaaccactctacgtgtggtgaagggggaggtctttattgtggatatgagagaaagaagagccagaggcatccgaaagagtgaaaaccagagagaaagaaatagacttaacatggccaggagtctgggcctggtcataaatatttgctaaaaaggacaatagtgggggatggggacagagaaatcagtgagagaagcaggggtggggtggggctcagtgagaagagctgggttaggagccctatgagtgactgatggggagggaagcccatgagctgagggcagtttaggagaggggaggtggtgagaagggctaggatgctggctagcatgaactttgaaatgtgtaacaagtacttgtgataccagcatacactttgacatactgacccttctgccagagataagggcaatggactcctttggctggcttttatctaatttccagaaatcctataggccaggtagagctcatttctagacagttggacagctgaacggtcttttggagtttgggggggaattggagtttcttttgggcacagcagtttgctgatttgcatctgatatctagaatataccaagagtttggaatggtaaaggctcttatacttggtaccttatgaaggggtggaaaaaaattccttttggttctttaagaagcgattcataatatttgtccttcagaaatgtctttaggaaattttgagactctcctcagtgcaaagttcctagtccccactccttcactgtagtatgggtggcctggaaaagctctcagctcttagagtaacattaatgaagtaacaggaggcaaaaggcctggagctatgctcagcttaggggtagctgtgtctttaccacaggatgtgtgcctcaagcacccaggaaacagcctttctaaaagaagacacactcatacatgcatgcacatgtaaagtttacacacatactagtacataaatgttaaaattaagtataatttgttatatttatgatttatggcctaggaaattaaagtttactagacagtattataaagtcagacaagtaaaattgtaataatgatcctgtcacctccataatccttgcggcatgctatagtaccttgcatccctcccatgagacgcagacgtgttcttactcagaacgtggacttgcccaacaccatgcctccatttttctagcattgtgttacctcgagtctctcctaaaatatgactccacatgtagtatggcttcctcagttgtagcatgtgtgtgtatgtagtgtgtctctgtgtgtatgtgtgtagtgtgtgtgtgtgggtatctgagtgtgcagtgtatgtgtatatgtttctgtgtgtgtatgcctctgtgtgtgtattaccaagtggtcactagaaggtttaccctgcagtttttagggatggcacccgatcacacactagacagctgctttcctcatatttcttagagcagatgttaaaaatggctgaagaagatgagaggtgatttagaaagcaaggagtaaccctacagaagcatctcacaactgtgggtattttggttcattttgaaaggtgggcaaagacagctgttgattttacacttcaatcattttctttaaaacaactctggaaacatgaaatgtttttttgatttttgaaagggctttatttatcccagaagggacatgaaagttttatgaatacaataaggagattaaatataaattaaagcactaacaagtgtggaaaatccaagttttgtgggttctgacgcattggatttgttttctaactaagccatcttctcagcccaaaacccaagttttaaaatcatagcaagactgagaagcaagaaataagttgatgtctggaggccgtcagcatccctctccaaatactactgctgtttacaatagacagaattattgcctttagagccaatggagactttaatgtacgatttttctttttattctgacactgagattacaggaaggtcaaaggtgataaagaactgacaaccagagcctgatactacttcttagtaagctcttggagagcaaatagtctcggggtgagagctgccagtgtatcagaggccgggggctccaggatgctcaatggagaagccaatcgccacaatccggttgctggctggaaagaatcactgtttttcagagataattagaaacttgaagaaggaaatccccctgcaaaagccccttctaacttatgtgctgtgggtgaattctcttggttccaaaagtcccgtactaagcacatgttttatacgaggtgccagagaccacttactaaagagaaacaaacagcatgggatttaaagatgcaatgaaataatgcaataaaaattatcttggagccaggtttaagatagtgaatccatctcttcttctttttgagtaagtaaatatttaaaaattgcccaaacagtgtgaaattaaacataaattctggaaaataaagtcattttttaaaaaatcagccttatgggaacatctaaaaattttacttacagcttctgagccttatccacacaggtacataattgtatgtttaatcagtgtgatgtatgctctgttctctgacactcaatatatatggtaaccggcttatgtttcttaaggtaatgatcacctcatgacattttacttgatattttatagagaaggtatttattaaatgaccttgaattagcataatttcatttattaattttatattttataaggaaatgttttgggtgtaagaagtactttgatgatagtgtttacctagcatgtaccaggcctgaatttgatcccagcacaaacaagcaaataaacaaatcagtcaattccacaaagaagaaagcagtgaatagaagtgcttgctggcaagtcttccaaccagagctaggtccctggcccccacgtggtgtaaaagagagctgtcttgcagcttggacctccactaatgcagatacactcacagacacacatgcatgcatgcatgcatacaggcacacatgacacatgcacattcatgtaagtaccactgcctgtagtcttgttttatttttgctgtgggagcacataagtgtgtttgtataactcataaaagcagaaagaaaacccacttagttacctaccagtaccccactccccaaaatccttgctgtcaaataggagagggggcttgggagctggctccatctcaaaaactgccgctatgcaagtacggagttgatagttgtaatagcaagcaatctttcctttttaggaaggaaatgactggccatcttctctaaccactgctcctccatgtacacagctccatcaccccacagtcatgagaatttagaagcagcagccacaatttgttcaagcaattgtccaagccccactcagtgcagatgcttggaagaggcagtctctgtgaccatcagggctagcagagtatggtcaccaggaggtaagaaggcaattcagttcaacacagctaagtagccagtgtcaattcctactttgggagtctgaccctgagatgtttattttaggcacatggcaaaattgggtgaaaactttcctggtgataatttactcaggactgtgtacacaacaaagcttaagacatgactacacagaaagttccttatacaaaatatgtgacatcttccataatgatgggttctatactacatgtgatacctttcataaagattgggtttatagattgattagcttaccataagggtctgggggagaatccactgtggttccagccatgaggcataaagtacataaggcaatgcagatgtgtgtgtgtgtgtctgtgtgcaaaatttttgtcaaagaaataggctatacattgtttgaaactattttaacacacgtagtatgctatgtaaaatacatagatacgaatttatttatacactgatctttattgttagttggaaccatttaaatggtagatgttttttttatctatgttggaaaacagaatagggctagtgtagcacacagggctgttcccctacggcttagtccgatctggcccctggttccaggtgtggcagcccagctcaacaaagtccactcccacttagctatcctgactctctggatcactgctagagctcaagcatttttaccaaactgtaccatgtatgattctggtatttgttagagcttttgtgtattacccaataattctgacatctatcggggtttctgagagcagttttaggaagtttgcttttaaagtgtccataatgctgttttccatttgcagcatactttgaaaagttcaccttattatgtaagtgttcttgcagccataatttgcgagtgtagtaagataaaaaagaatgcttctagcttatttaaaatgcatgctgatggcatgatctggaagacagacaacccaatttgaaagggacacaatttaccctagaacctatgttttcacccctctatttgaacttttggagttaaaaatgtttactttcaagttgtagatttgaaagcaaactttctaaagtgtgagtgggggcaaaaaaagaatcttctccaatactttcccaggaggtaactaagaacattgcatcattagatttgtctttttcctcctatttattaaaacacacacacacacactcaaacaaaacaaagaaacaaacaaaaacctgattcacagaagacagtcaatccacacttctctccaggtgtaaaagcaaacatatttctttattcccagttctagagaagtactgagtgtcaactaagtcactttattttgctgtctcattgataaccggaaggacttgtcaggacatgggtaagaaggcacagcatatttttatagcaagtattgtgtagaaatgatgtccagagacacatcagaaagaccactcaccatgaactgcagtcacaagtttgtaaagtttgtagtgaataatgtgacagagctttctattcagtcaacagttctttcccgtataactttaaacggaccctgtactttttgtccagtttgcttaaagaagacagactttccatcacgatgaagcaaatctggtaggtccagagatggtagagctggactcagagcaccaggggaaatagatagctctgaccacacaaagtcaagcagagaagaacaactaaaaaggggttgtatttatgatccttaattcagcaagctgatagtactgccatcaaaaccaaatgacaaaacaaaacaaaaaacccaaaaatgttcatgaaagaccaagtggtactcactcaaacacaaactcttttcatctctgagacattaggtggttcctgtttcagatttactactgttatctcaaagctcctaatcttatccctgaacacaaaccagaaacctttgcagaacttcagacttcatacagtcttgcagcccccgaagttgcctcttttcatttgttgtacagtgaattcatactctgagcaaccagcatcattcacattttgatgaatttttttaaaaagaatttcttgtctttattttgttttgtctttgttttgttttctgttgtttctccctctcctctcttgagacagtatctctgcatgtaggaaccagtctagcatcaaactggcaatcctcctgcttcaaactccccaggatctgagatcataaacgtacactgctatggctgggtcagacatattctcctctcctcctttcctcctcctcctcctcctcttcttcctcctctttttctcctcctcatactcttcctcctcctcctccccttccttctcctccttctttccaaattcctcgacttctagaccaatagcatagccgtgttcttctgtagtaactgtgcactatcgtcttactgaagaagatgcccttgtggctttgactaggagtaagattttactgattacaatggagacaaggcttcactgtgtcactacagagacactgtgtcaccgcagtctgccttcagtctatgctggtgtcagaacagtgtggaagagtgtggctgagccaggcatctagcaactcattcttgccatttacagggctgacattttcactacccaaaaccttttttccctttccacttaaaaaaataaagtcttatcttgtttgttttgaacctgaaggggggggagtaggttctctctctctctctctctctctctctctctctctctctctctctctctctctctctctctcaaatctagtttagccctcaagatcctttgccctacttagccccaggcaccagccatatttacaggaggttcaggtcttcaagtaggtagcttatttcagtcacctgtgtgtcactgggctcgtcactggcttcttacttcttgagtgctgacatgaagatgtagtgagcttgtcctagagggtaccatggcacaggggccagtcctcctgggtgtgctcattcctctaccatgtcttctgtttgataacttgagtggctctgaaaagcacttctccactaggcttcaggccaagaaaatgcccactggtatctgtttctcataatctgttaacaggtacccacgattgtgggattccttgtgagaattccaggggagaaaatgtgaagactcaggcatctatgttccagatccacaactctaccagacacactgcaatgtagccatggctgttcataaaatgctgctccacctggagagaggatcctcaaactgaggttggcaggcaagcctcctatccctccacatcccagtcacatctctgactttcgtggctctcctacatttttccaccctagactaggttcttgagcccaacttctggacctgagagaaatcttctcaaaaatctccccttccgccaagcatgtttttgttttgaaggttcctcataaaactaacatgctgacatttgtccagaattgtggaaaaacagttactagtgtgcctaaatgaagcaaaagcaatgaaggaaatccttacaagcatgcatcagagcctagtgcaggcttggaacagaagtgctgaactagagtcctttgtgaagcactctcaaatctgggcttttgggaaagtcatttctcaaatgttgtgttcactttcaactatagctaagtcagcaatgattcctcgtgagtactttgctgtaactgaagaggtggtgcatgtgaatgaactgaaagggccaggcaagtgtcacaggcaagatgcaaataaggatggatactctcacatcacatgggcgcaagagattcagaaaaggagagagaaaaaacaaatcttctgatttgcaggagtgaagattagactacagattaaaatctgtaggtaatgaaagattcaaagagatactctttataatgatttatttatagttgtgtgtatgtgtgtgtacatgtatttgtgagtgtgggtgtccatggaggccagagagggttacagatctcctggtactgaagttacaaggggttgtgagctgcctggcttagctcctagaaaccacactctggtcctctgtgaaaatggtgcatgtactttaaatgtggacccctctccagcctgaaggagacccatttttaaaatctggcttgaagctgagcagatgtcacgattcctttctaaccctgatgttccaaggctattgtgagtgcagcacaggagatatagacgtcctctgtgactgtgagggccaaagcgctcattccctttgtgggttgggagccctagaaagctagtccccagcatgactctcatgcttctcccttatatagcataggctctgtaacttttttttatgctttgaagttgttttgttatttgtcttattttattaggtatttatttcatttacatttccaatgttatcccaaaagtcccccacatgctctcccacccactcccccacccacccactcccacttcttggccctggcattcccctgtactgaggcatataaagtttgcaagtccaatgggcctctctttcctagtaagccatcttctgctacatatgcagctagagacacgagctctgggggggggggggggagggtactgggtagttcatattgttgttccacctatagggttgcagatccccccagctccttgggcactttctcaagctcctccattgggggccctgtgatccatccaatagctgactatgagcatccacttctgtgtttgctaggacccggcatagcctagcacataggatgtgatgaagacatcccactaagagtcgagtgctccaaagtctctcacttcagacactgtccagttatgggactctgggttactgtacatctactgtaagatggggcttctagggtgaggttgagagatactccaagccatgggtatagcaacatgtcattgggtcatttgattgctatttttctatagcacaatattaataggttttcccctagctgagaccactttttcttagtgaaaaacccctcactcaaattccctatgcatcctagcttcctttacttatttgtaaagtatgatttcaccctgacaaacccattacctttcttcttttatttttatttaattaatttatttatttatatttctagagacaggcttcctttgtgtagctcagctgtcctggaactagctctatagaccaggttggcctccaactcagagatccgtctgcctctgcctccccagtgctgggattaaaggcctatgccaccattgcttggctacatttctttctttattaagcatttcctccctagagagggttcatattttatgtcaccctgcacacagagttttggtcagacactctgcaagtatcctgagatgaacaattaaattgatatgctgtgagtaaaaatgataatcctctatattatgtatagatgcaccccattcagtctgctgaatgtgttaataaacaaacactagcctgctcatttcttcagtaagaaagatttccatcctcagactgtcataggacttgagattttgatgcagattttctggttgatggtccataccatctgatctgagggctgacacagctaattcttaaaacaccctccacacacaaacacccgtctgcatgccatgcgtgaatgtgttaacacacacacacacacacacacacacacacacacacacacacacacacacacacacacacctgtgataaatttccatttccctggtgacaaatacactcacttatatatagacaatgctacaagagaaaatgtatctttccactgtttttccgaggcacttaccagaccacacctgacacacagtaggtactcaacagtacatttgcttgtttgatacttcgtttagtagactgtgcactcaagactttaaaatggtttacttgtcagacatttaactaactcttgtattcccctcttttccctcctatccttggtcatagtttatctactttcttgctatgaattcattttctgcttattctgcttctcaaacaaaacaaatcaacaaccacccactcagaacatttagctttgtgtgggtttcctgccctatcatagttgaaatgctcctgtttctgcctgaatggtttcagggaaatcactaaattctgcaaagatgactgaatgcaaaaaaaaatgtagtgaaataataataaaaattctttaaatacaaactgtgtggagcatggcttactttgcctctctttttggcacctgacacaattcattgatgtcgtgttaagtaaggaacattttcagaaggactctgaagtgtgtgtgagaccacatctgaaaggcagttgctgctggataaagccagctggctgtgtctcttcactcctcttgacctcagaattcatatttctcgactctggatgcattttagacaatgtttccctgtcctcagtgctggggaactaggaccccatgcacttttggcagtatgacacccttgagctcctttataaacaacaacaaaagcaatatttttattttgagatgtcccccctatgtcactaggctggcatggaacttgcgtagaagaccagcagacttgaacttgtggcctcagcctgagtaactagggctgtaacactgcacaaccaggcttccatgggtgaggtttgacttccagttcaggactttaaaattaaagcagaatgaagttgaggagagaggtatatttcttttagaaagcttcaaaagatagaatgtgtgcatactttttttttcatttttattagatattttctttatttacatttcaaattttatcctctttcctcatttcctcctccaaccccctccatcctaccgccccaccccctgccccacctccattcactaacctacccactccagcttccttgtcctggcattcccctacactggggcatcgagccttcacaaggccaagggcctcttctctcatgttccacaaggccatcctctgctacatatgcggctgaaaagcttgaattcctcctgtgtactctttgcttggtggcttagtccctggggatactggttggttcatattattgttcctcctatggggctgcaaaccccttcagctccttgggtcatttctctacctccttcattggggaccctgtgctcagtccaatggatggctgtgagcctccacgtctgtatttgtcaggcactggcaaagcctctcaggagacagctacattaggctcctgtaagaaagcacttgttggcatccacaataatgtctgggtttgggaactgcttatgggatagatccccaggtgggacagtcactggatggccgttccttcagtttctactccaaactttgtctctttatgtcctcccatagttatatagatccctcttctaagaaggaccggaagtatccatactgagaaagctactagtagcaacaacccatagatgtaaggtgtctttctgctctgttaacttgaatatttatgcacttgtgaatccctcagctgttgcttaagattttcataccaaagacaggctacaaatccacagggcacatacaattgggcaaaagcttcttagctttgtcattttttgccctagcctcaaccctataaatgccctctctttgaatttcaatgtgtcattttcttgtttctatggaaaaccagaattgacaggaaagagaagcaatttttgctgacaccagccttactccttacctcaaccaacgtggctgttgctaggaatcgttactcctcctccactcaatgggttagactcagttttgatcattgtcaccaaagaatattgatcgaatgctcctagcctttgaggtatttctctgacttgagatttctttttctctcttgctcaagtctccctaacctgcccacgtgtgtatttgtgtgtgcatgcctgtgtgtgtatatgtataagtgtgtgtgtgtatgtgtgtgtgtgtgtgtgtgtgtgtgtgtgtgtgtgtgtgtgtatgtgtggtgtgagtgtgtatctgtctgtctgtctgtgtatggagtttggaggtcaacattaggcatttacctcaatcattcttcaccttattttcttgaaagaagtttttcactgtgtctagaacttgctgagtcactaggttggcctgactgcactcccaggaatttccctgtctccctctttttccccagtgctggcacatggcttcttatgagggttctggaggatccaactcaggtcttaatgcttgcctcccaaacacttcaccaactgggccacctcccagatctagtttatttccatgtgttgccaatttctggaatgtcaaatggcttagttcatctctcattggccagcaggactttgacacagccatagagtacagagccataagaatttaaatagcttttgtgcaaaacctctcttatttgaacaattcatgttgggcatatttcccaataaattactattccctagtgccccccagttctgtcaccatagctgatggctatccaatctgaaagaagacccaacatccactggaccagtaccctatctattgctgctgagaaagcaagagacagaaactgccattctgaaaagagaagttgatgataataaatatagtttatttaagctgccctgttagagatgtcttaaaggaaggagtacagatttgagtgtgttttaaaagcaataggttgtgggtgtagcgtggtggctgataacttgctagattccatgaggtcctgagttcaattcccagcaccacaaaaggaaaactaaaaggacatgcaaatataaagtgtgaaacatccctgcacattatcttgttataaagcacacatttatgtgcaagtctgcctttgggaacttacctttttcccatcagtaattgattatatttatagttaccagaacgtggcttaacaaatgtctattgggttgagctgacaatactttaggcacggtgctggcattcttaggctcagttcttctcatctttgtagcacttcttcttgtcatttacacataattgctcaagtgcagaaagtcagtcttattttacattatgctcattcatctctgagtacagggaaaaaacactatactgagagctggaaaactttagagacattctagctgtccctttttctagtgagaaagtccagacaagtccaatgtttcctgaaattttagtctcacttttccctatttgaaacctggatgtcagagatgcatcctaaaatacatctatctcagaagaaaatgtggctaccacagaggatctaaaatgtacttagagaaatcctaacaaagggaccatgcagctgttacctctacatgctttagtattttttattttttttgcttattttcctaagcaaagataaattggaaataattttgtttgggattatgggtttatgtcttcaggagaaaagaattagacatagatttaaagatttgttctccataaagaaaagaaatattacacacacacaagggtaaagagatttctaaggatttagtgggaagtttattgtatctttgaaacagtgagacattgattctgtgactgggtagcaagaaggaagcacagacatactctgcctaagaatcaagtctgatctgagtgactccttatagcttcatgattaacctgtaaagacagaaaatactcatctcattaacaagtgaagaaatcaaggcacagaaaagtcagtcactcttggtagaaacaaggtttcaaactctgtttactttgatttgttttcccctctcttttgttgtggggacttaatgtcagtagtaacagtagaaataccactgctcacaggaaacatccttactaattaccatgcattgtgctcagagctttgaatgcatggttctatttaattatcactacagacctgtgagacagtgggtatttctactgttcagatgatgagtcggagcctgggaggcagtatggattctcagacctcccctccaccacccatgtatggaacaattatgtagagtcaacgctgtgtttctagtgtgggctagaaaaacctgcggttgaacctgccaagccacagggtactcatctcctggcaaccaccaacatgccttggtttagcctgtacacagatctagtcacttccaggtgtgtgacacgtatttcccacgttgcttggttcagaaatcactaacatccttattctgcttctcctttacaggtgcttgctggctcacagttaagagttcatactcaaggtactaatagcatctccgagagtttaaagctgaggaggcgggttcgtgaaactgataaaaactgctcagaaggattatatcaaggaggcccattttgctgtcaaccatgccaacctggtaggtcacatgaagcattcagagatgagcgtgagaagcagggtgagagattgaggtgcccgatatggaagaatgtgttggaccattatgcagctattggctgtgctatagggtagagcattacaaagaagggggagcaggactataaaattgttttccaagcacaattctttcatctttatcatatttgtctgggctgcttctaaaagaacatcatttacagatgatgtgcatagctgaagtgagaagacgcatttttagttctatttctcacaacctaaggaaaattcatttgtgaggattaaaaagcctaaggcatctcaaagctcaccatgctgtgcctgactaatttgggggctcccttaacaagagatttgtaacctcaggggtatgtgttagagctcctctcttcagtctgactctaacgttctctggcctggcactgaagcctgcaaaaactacatttccattttttcagctgaataaccagaagaaccagaagagcagtgaacagcagccaacagtttctcaaacatcagtgttttgaaatgcaaatcaatttcagtttggaactctctcacgcatcagaaaatgagaggctaaggggagcataattctgtaaacttagtttccaccttttgggttgaccacagtcatatagaattatctatcttggatgcactaggcggataagaagttggctcagtggcatataggtttgtttgataggtctcaggcaatagactttcaaaaagcttccgtaagtttcatcgttagcatctcaggcctgtggtactcaaagtgcaaagcaggttaaggtcacgcctatacaaagacaattttactaagcctagcaggaaagtttttcttataatacaacccacgtatacctaagctcctaaacacttactcttttccaaacaggaattggaaatcatcaactggcttttttttttcttttaagttgtcatagacaagcaatttatgagttaaaatctgtgtttatactttgaaagtttgatacaaactatactttacatgcttaaaatttaaaagaacaaactaaaacaaaggcaatgcgttttgcatattaaggtttctaaaacttttgtctgtgtgctttgttttactctaattttgtcttgtttgcatttaaaaggggaatcttatgcctggtgtttggatctgaggatgctctcgttccactgtggggtgtaaatggtgcaaacatttaagaaggaaaagggaacatgggtggagaacccagcaatgttttttttgctaatacagtaatggattaattgatctggaaatgccttaaagattacaagtattgtgtatatggcatttcagtttgatacccaacagtgtagggtttggcttgtaaattctggagtaatagaagcctgggatagtttgtattaagcagattctaagtgcctcagcctttgttttatttttctaacttagtccttagttgtacgatttcttttagcaattgcaacctggcattctggctgtgttaacagcttttctctgtctcttcactaatacatcccaactgccattccacacgcactcacagctctctccacctgccttctccctggttgaatttcacatttaccaagagttaagttagtttcaagtctgtttacagcattgatgatagtaacatagaatacttattactgatgataaaaacccagtgaatatcaaatattgggaaatgacaagttttatttttttttttaaagaaaactaggctgagcattttggagaccatcagaaattcagcccgttggagtgattcaactttcttttcatcaaaaagaagagaattgggagaagggggtggggtgggtaaagaagccaaacggaaattgcagggggtgatttgggtggatgcaactttaatgaagagactataactcatctctatgtcaaacgattgacatacttatggagagactctttaaaatgaaaacacaatatagacttttccagtgattccatctgtgaactggtgcttttgattgattaaaatacactgtatgcttacagcaatttttaaaattggaaatcgattcttcttctttacaatcatcccgaccacagtgtcctctccttccatgcttcctgtcttccctccccaccaccagctgcacctattcccttcagaaaagagcaggcctccaagagacaacaaccgattatgacaacccagcaggaggaaagcagagtaggcaagagagtcagagatacacccgctcccactgttaggaatcccataaaaactccaagatgacagccattacatatatgcagacctggggcagacccaggagggctctgtgcttgcttcctctgtctctgtgagctcatatgatccctgcttagttgactcagtaggccatgttcccctggtatcctactctgcctctgcctcctacagtcttcctcccttcccccttccatgaggttcccggagctctgaggggagcaacacaatggagacctccaatttagactctttctctgcatagtatatggctgtgagtctccatacccactcccatctgcagctggggagaagcctctctgatgacaactggacaaaggacccatctatgagtatagtagaatatcgttgggaatcattttattgatttttttctttctttttnnnnnnnnnnnnnnnnnnnncaggtaccagcttgacgtctctatgttcaaagcagctgggtggatgttgtcctcagcaatggtggcctccccaccaccaccaccccacacacacacccgtcagcttttggagagcaaccctctgttctagcatcagtctgggttgtttaggaattcgcacaggaccccctcaggcaacaattcaaccagatgcaacccagttccaccactggaagccttgcctggctagaaaagatggccagttctgactctgtatcctccattacttggagtcctcactaaaatcaccctcatagattccaggaagagtccatcacactaggtttccacatcgccccaaaatgtccaccaattccagctctctctccccaaactctctccctccatccctccccatctccaacctgatacctcgcactcccatccccacccatcccagtccacctgcaaaatatattttgtttcccctttgcagagagatccatgaatctcccccaagagtcctcctctttaactaatttctctgggtctgtgaattgtagcttgactatcatttaattaatagctaatattcaattataagtgaatacataattgtgttcgcacaaataccatatttgtctttctgggtcagggctacctcactcaggatgatgtttttctagttccatccatttgctcacaaatttcaagccagaaatttttaacatctgagtactactccattgtgtgcactaccacatctttcttttttcatttctctattgatagacatctaggttgtttactggttattacaaataaagctgcagtgaacatagtggagcaagtgtccttgtgatagcatggagctttgttggggtagagcaagagtggtataactggaccttgaggtagattgatttcctattttctgaagacctgccatattgatttctgtatggctgtacaagtttgcactccgccagcaatggaaaagtgttcttgctcctcatctcaccagcatgagctctcacttgtgttgttgatcttagccattctgacggatgtaagatggaatcgcaaagtagttttaatttgtattcccctgatggctaaggatggtaaacatttacttaagtgtttctcaaccatttgagattcctgtgttgataattttctgtttagatctgtgtcccatttgaaattggattacttgggatatatatatatatatggtttcttaacttctttatatgttttggatattagacttctatctgatgtggagttggtaaaaatattttcctattctgtaagttgctgctttgtctaattgacagtgtcctttgccttacagaaacttttctgtttcatgaggtcccatttatgatgtttctgattaagatgcactgtatacaaatacaaaactttaaaaaataaataaaaatttaatacttgaaaagcctttatcacattttgatatccagtaggatgaatccaacagtgcattttttatattatatacacacatatatacatacttatttgttgcttctatatgtgtatgtattgtgtatgtaagacatacacacttatctgttgcttctatacatgtatgtatatatacacacttatctgttacttctatatatgtatgtatgtatatacacacacacttatctggtgcttctaaacatgtattatgcatgtatatgtgtgtgtgtgtatatatatatatatatatatatatatgtatatatatatgatannnnnnnnnnnnnnnnnnnnnnnnnnnnnnnnnnnnnnnnnnnnnnnnnnnnnnnnnnnnnnnnnnnnnnnnnnnnnnnnnnnnnnnnnnnnnnnnnnnnnnnnnnnnnnnnnnnnnnnnnnnnnnnnnnnnnnnnnnnnnnnnnnnnnnnnnnnnnnnnnnnnnnnnnnnnnnnnnnnnnnnnnnnnnnnnnnnnnnnnnnnnnnnnnnnnnnnnnaaatatatcaaggcagttgctatgtaggagcttttaacattttcctagcttttccaaattttctgcaataaatatgtgtgtgttactatcagaaaatgatacatctagaaaccttatgttcaaggaaataaccatttatttttttgtatttttgtaaatttagattgtgcactttagaggaaagaatctgaggctaattgtatccatataaagctaagcatgctctactacctagctcatgagatatttcagttcccttaaacagcagtgctgtgccacctgcaggaagcgcagtgcctcctctgttctgctccccctgcaaagcactactgtggggctgtctggctctgaggcgctattttaatttgctccagactctcttgctttactttttaaaagcagacttgcttctgtttactaaaaggttacaaaaggtcacccatattttcactttactcattgacttatcaagtaaataattgtgcttcgtcagcaggaatcctatgaggtaattcaccaagccgtgccctaggaaacacagcatagattccatttgctgctgtgtccatgtggagcagatttgactgcgtttgtcatttgtattcctggctagagttaattgttagttacactgttaatgcctagatttgctagttactgcatcttgctacatttccctgtacatttgctgcactgagcccattactcactgaccctagcttctggctgcaccggctgatgcttagcatctctgcctgagaaggtgaaggccctggaggctaatctcttgtcttacttctagtgggatttccttcagttcctagaacatccttagcacgaaacaggcatttagtaaacgcttgtgaaatatgtgacctttccaggaggcattgctctataatgcttaatcatagaaaaagaatgacttactttaataaatcaaagcaaaagatgaatgtgtatttcaaattgttcgtgataataacaaacaaatagtaaacaaaatttattagaggtttgtttttgtctacaaaagaagtcctgtgttcctggaaaagaaactgaaaggggagagaagaaaaactgtgaatatttattctgtggcctgggcatggctctgaccataaagacagagaagtcctcattatttgtgtgacaaaaacttgggcttacagacatgaagtgctctatcaaagatttcacaactacttcaattttgatcaatatttctagaaacttccagtgctctttttcttaaactgcattgtctatgagcaggttttgtggactttgaaagacaaaatgagaatcagaacacagtgagtttattcagtaatctcagtggccaaggacagccacctccatgatctggcctctccttcctttcacagaagtgcatctggtcacttgaattgaccctttactcatatgttcctgtggctaactatcctactatttttttttcttttgagacagggtttatttgggtagcactggctgtcctggaactggatctgtagaccaggctgacttgattaaaggcatgagccaccaccacccagcttaactatcttacttttataagaatattgtttggctttttattgaagacttcctggcttttttttttcttttaactttctattggttctttgtgaatttcctatcatgcatccccactcccctcccccttccttcatatctaccctccatccttccctctcccttcccccttccttcatatctaccctccacccttgtaacctccagggcctgagaggtaatcttcttgtggaagctgtagtgtcaatgtatcccacagtattccctcttgtccacatttctttctttgcaaaagttcgttccaatgacatattggtgtggcacgaggcctttggcttctcttactctgtcagtactgaaatctcactgtgactcctcagatatcctgttgttgccctgtatcatggagatactgtagtttggagtctgtaagattagccccttcatgtattctaacagttcatccgtgggatggatgtggaggtgggccaatgcaaaggccctgatctgggtccgagaggtatctgagctggtcagcctgacagctcccatgttctcacaccctcaggcctggctcagctatactctgctagccaggtgaggtgcgtggcctgctctcccaagagttgctgttagtgagggatatggccagttctgctctcacaatcctgggcgaggtctcatgtctgccttagatggtgatggacaagggaagggaagagggtgtctttccctcatccgtgccaccactcagcagacaggaggtagaactggctctcctccactcatgccctcagggccaggaggctcacctgcatcttccacacccagggccagctctcttgtgttgcccaggcaaggtgcagggctggctctcccaagggcggcagcagataaagggcagggacagatcttctcttgtgatcctgttggggtccagctcttcagcctgccaccagaggccgggcaaaagggaggtgaggggatctctcctttgttgaagccaccacacagcagacaagagacagaactgggtctcccacatgcacactctccctcacccgtaaccccaacatggtgggtcagctctactgtgctgcccaggagagatgcagtgagtgcactgctgagtgccacaggtggtgaggggcaagtgagtatctcttcctgctggctctggatgtgattctttccccaaatagctgtctgtcttttacattgcatttgcatataatcagcctaacacagcatctcctgatgttaagattctttattatcatccttacatactttgcctaatgttaacttggagactgccctgactccagaaattcaatttattccttccttccttcttcccttccttccttccttcttcccttccttccttccttccttccttccttccttccttccttccttccttccttccttccttccttcttccctccatctctccttcctctctttcttcctaatttcctctctttctttctttctttctttctttctctctttctttacttctttatttttttcatgacaggtaaaaaaaaagttgaggactgcaaaatgaatgggggtacaccaacctgcgccccatgcacagaagggaaggagtacatggacaagaaccattatgctgataaatgcagaagatgcacactctgcgatgaagagcatggtatgtatctacaatgcaatttagagaggccaatcctgagcctccatatagaaccatgcagtttgagattggcacttaccctggtccatgccagcatacaggaaggagcggaatgaggctagctgggtaatgtggagctatcttgtaaggtggtaatagattctaaaggccttcacagtgattcttccaaatggaagcaaaggactaaataactcgatgaaaacagatactccagccacaatccaagccacccatagaaatctttcccctctatttctattaaaacttgtctgtagttcttgttcatggcctaacaaagaaacccaaggtgtgggaatgatgtcccttcatctttggggatcccatctatcatcattctatttggggacctgactttttgtagctatttcaatctcttctcaaggccaggatggattttaagaaatgacagaagcagttgtacttaggtttgacatcaagaaaactctgggtatcaaattttaaagctctttttctctcttctctctctttttttttaaaggcatagggcttttacattagtctataaagaagcgatgcagaaccctggctatacattaaacctgcatcaggagctgttgaaatactaatgcttaggtctcagctcacaattaagtcagaatctccaagtgtggcttggacatttgtctgataaagcctagtttaggcttatcatgaagcagcatgatggtgataatgatgatgatgatggcggcaatggtttccaggccatgtatttaagttgcaaggctttctattaaaggcatggcgttgccatctaagcaatggtaggtagtatctggccttctggattatctactcaccaaaggctctttttcatgttggtatttccttttggttagtaaacattgttactaaaggtgtgatagtgtaatagctatatctaaacaaaaaccaaaaaactatgccatccctggccatttttcatcacttattgtttttattattattattatttttagatttatttactattatacataagtacactgcagctgtcttcagatgtgccagaagagggcatcagatctcattatgggcggttgtgagccaccatgtggttgctgggatttgaaatcaggaccttcggaagagcagtcaagtgcttctatccgctgagccatctcaccagccctcatcacttattgttaactagctactacaattaaaactttttaaactggctttccaggtttagaggtggaaacaaactgcaccctgacccagaataccaagtgcaagtgcaaaccagacttctactgcgattctcctggctgtgaacactgtgttcgctgcgcctcgtaagttttagcattcagtgcttaagtcactagctatgagatggaacatcctgccttctgagagtagaaccacactgaatgagagttcggggctgagttctgttcttgtctgtccttcttttgctcagttggcaccaaacgccactgagctcttttaccaaagccatccggttcaagggatgttgctagccacttacggttgtgatgggagacacgtgactgtcatcaaggttttggttctagggcaaagacatccaagttgggggggtgtgggtgggtgaagtaatcaatgcttattgcatgtcagctccttatggtgtctggcacacataagacatttttgctcggattggtgcaagttatgcaggaagtccttttgactgtctgaaaggtgagagtatggaagaggcaggaaaatgcaccagcagctacaagtgggtaggaagtgtgttcaggcagagaaccgcagctttaaaaaggcataagaaactcccatatctgctggagggtagaaaagccttggagcgagctggataaggactttgccttgatgcacaggggttcgcttttgactccaatctggaaagtctggatgtacagcccacttgctgattaattgagctagtttgagcagatcacttactctgtctggacttcagttttctcactcacgaaatgcaaagaatctttaatgaactccgcgcacctgccacatttctctggagacccacactaggtaatatattttgcaaacacagcttttgctaacgggtaggtacatggtaatggtagatcacttgtccggcatgctccaggagtctcgggttcgattcccagcactggaagaaaagtagcttttgttttgtaagaggctgacattgtacaaaatgtttataacggctatttccttggcattccttaaacctgtaactcaccttcagagccttctggctgttcatctaatactaaatctattaatgctagctgtattagagacatgctgctttatattttactattaggaaaagcatttgtgttgcctccctctcccgccccaagtgtctgagagtgatgagaggcaaggtatacattgtggggaagtagctaactgcgttcagcaataacacaatattagctccatatactttataatcacgatttaattttcttctcactggcactctttggggtagatagcataattatctctgtgctgttggtgagatttcagattcaggctcctgcaggtcaactgctttcccacccttgcctgtttaggtttcaggaaaaggtaggctgtgaacctgcagaggttagctagctgaagaaagtcccccaagtgcctcttcactgtcctgagcactgcctgctggggccctgggcagcatcttaggtggtggctaccagcaggcagttttaagggttttttaaacatttttttggaaattgttcttgataagttatttttttaaaatagcttatttttagctcttatatcttaagaactcaatgtgtcaccaatttagtttttaaatatggggcccagcgatatgcatgtgactgtggtgctgaggagggccagaagatgctgctggatgggacttacagaaggctgtgggctgttaggtgtgggttctgggagctacaccttcttcttcatgggcagccaacgccctaaccattgagccagttctctagcccctatgtcttaaactagatttaagattttcaaccactcagtcgcactccttagtttgtgtgaattttagatggcgatctagaaatatctgaaaagacacaaatggcgggaatgagaggacagataaaagtatccctaatctgtaatgtacattggaaaaatggagaaggaatctacgcaggccttctgagttcttctgccttctccccctaggtgtgaacatggaacccttgagccgtgcacagcaaccagcaatacaaactgcaggaaacaaagtaatcctttcccacttccttcctcacatgtcagaataaaaagatcattggcttattattgattgagagaacagagatctgccttgtctaaaaaattactcaatttcatacaaaatatccaatattcgcaggtcccagaaatcgcctatggttgttgaccatccttgttttgttaattccacttggtaagtcctaagtttgttcaaaatgtagattaaagtgacctgagaagtagccactgtgcccattgagaaatcccagaaagccaggctgcgtgttataatgacacccagtaaacctggccttctctgtgcctgtcctcactctacaacctgtttactttaagttattattttaaaaaatcactcctccttattttgtgtctttaatttaaaatgtatgacaacgtgtttccttcaaagattacttaataatatcagtagttaagggaaagctgggtatcatcggggttattctgaaaaaccatctcgctcgaagcacagcaatgataagatacaccaactttcagtgactcagaatcttctagtctctcctgtgttgctggaacaagaagctgtcttgtcaccccagttctcttagtgtgaggatttcctaagaatggcatttgagtctgacagaaatctcttcgatctttcagtatttatatatcgaaagtaccggaaaagaaagtgctggaaaaggagacaggatgaccctgaatctagaacctccagtcgtgtgagtatgcaaatgcatacaacaaccaattagcactttctttaaaacaaatgcaattagcactttctttaaaacaaattcaagtccctccatgcccattttagaagaacatttgaattaacacaccaaagctaatttattactaagttttgtggggtgctacacaaaaaagggtctgcctcctatagccatttgggtctagatggaactggatctgacctgtacacttctttctcaaatagaagaccatccccgctctctactgagctgcacaataaagcatggtattggaaaagatactggaacttgttaaagactcttaccagagtttaataagggaagcagttgttttctgacccctgctgacccagaagagcactcagagtcaccagcagatttaatcaaccagtattcatatgttgccgtcagcatttacaatgacttatttaccaaggagctgtcagcctaccggctgcttccagggaatgatgttagactgaattatcatagcacccatgcacacatgtgtcatcacgggtgggggacatgattaaggagcacagtttaagattaaagccgtgcattaaagtttatgattgtgcgtgaatcccaggtatagttgggttgtttgcattgttttctcaaaacaggggggtgggcttctgaaggcaagcttacaagagatacttactaaaatgaaataaatccttataaggttttacataaatactgtagggagaaatgaaggaacatgtgcctaccagtgtgagctgggtagggatgtgtaatgttccctgttttgtggaaatgcaattggctaaagcacgggactcagatttccaaacccccgcaaagattttgctcttaaaatccagcacgtgggagacagagacaggcggatttctgagttcaaggccagcctggtctatctaaaccaggagggtggaacctttcagaatcaaaactgaatgactgaaagagctcatcttaaccacaaaggctagtttcttttgtgtgtgtgtgtgtgtgtgtgtgtgtgtgtgtgtgtgtgtgtgtgtgtgtgtagtcataatctctggcaattgtatatatttccttctgaatttagaaaaagttaaatgacatgcatgtatgttttttctctctttgcctctgctttttttcttcccaggaaaccataccaatgaatgcctcaagtaagtctttctattattttatttcacagaagtagctttctttatgggaataggcataagtcggaacaggctctaagattttagagtgaaataatgtttgaattgcagtgacactttaggctttaccgttatgtgaactgtcagttctagccaaagcttaaattgatagcagtctcaatttaaaatatacgaagaagcgataaaacagaatattatgagaggttcaagaaaaacattttcataatcagttagctgtatcacgggaccctttggaatccgatcaaatggaaccatgaactctatacatgtcctcatctctgcaacaacatgtccaattctgtcctgtcctgtcccttgacctgtgactcagccataggggtgaactgacctttaaggtttgtgggtttgctcatcaagtctctagggggcattagaggtgatcttttttttaagcttctgatttcatttctttttttttttttttagaatgaacacattttttatttaattaaggaaagcctgttccaaacatcagaagtctctctataatcctctgtatataaaattaggtcatttaacgtgttctccacattgaaagtatatagatagttccacaattaagagcatttgctactcttgtaggggacctggatttgattcccaacatcctcatagtgtctcactgccatttgtaatttcagttctaagggatgtgactccttgttttgattctatgggcaccatgcacacatatggcacatgcatacattcagacaaaacacaagcatgcacacacatacacacacagtggggggggaagggagggagaaataaagaggtgatgaaaggaggggaggaaggagagagagggagagaactaaaataaaaatcctgttaacaattgcccaaattaatttaactgtgacgtaatagaagcaaaagaacaaggttccaatccatggtacaatgtgttagtctgttcatttctattttacaactcacttttattccttatttaaaatagaaaatacatgttcagtatacaaacttcaaaagatgcactagtataatgtgacatgaaatttcacttcttactataattagtgactgtgcacactgtcagtactaaactttaaacacatctgcatatatctgcttttgtagttatgtgtgcatgtatgcctggacctatgttatgcttgcatttgaattcagatttggggaaagtttagttttacatgaatttgtgtaaatttttttaaatgagatataatggaaactatttaaatgtgcaatataatggctttttaagtcatcaaagtaatttaaaatagttaaatgcctcttaaatatacatgataacttctgaaactaaaagtaatatgtactcaaccaattttcaaaatctatttggaacattaaacacgatagaaatagaaaaaaattcttatgaagtcctctatgaaaggaaactgtgacaagatcctaattatacagaaaccattccatctccaagggagaatatgcagtataactgtggtttcatagaatgaattgggtagtgttccttctgtttctattttgtggaatagtttgaagagtactggtattaggtcttctttgaagttctgatacaattctatactaaacccatctgtatttttttaaagttatttttaagtttgtgtggttatcttcttttgggtttgtttaaagaagattacttcttgctttttcttgggtacagtttccttccttgtgttgaagttttccatctactatcctttgtagggctggatttgtggaaagatattgtgtgaatttggttgtgtcatggaatatcttggtttctccatctatggtaattgtgagttttgctaggtatagtagcctgggctggcatttgtgttctcttagggtctatatgacatctgcccagcatcttctagctttcatactctctggtgagaaatctggtgtaattctgataggtctgcctttatatgttaatgaccatgtcaccttactgcttttaatattctttctttgttttatacatttggtgttttgactattatgtgatgggaggaatatcttttctggtccaatctaattggagttctgtaggtctcttgcatgtttatgtgcatccttttctttttttattagatattttctttatttacattcaaaatgctatcccaaaagtttcctataccctcccaccgccctgctcccctacccacccactcccatttcttggccctggcattcccctgtactggagcatataaagtttgcaagaccaaggggcctctcttcccaatgatggccaactaggccatcttctgctacatatgcagctagggacaagagctctgggggtactggttatttcatattgttgttgcacctatagggttgcagaccccttcagctccttgggtactctctctagctcctccattgggggccctgtgttgcatcctatagatgactgtgagcatccacttctgtatttgccaggcaccggcatagcatcactcaagatagctatctcagggtccttcagcaaaatcttgctggcaaatgcaatagtgtctgggtttggtggctgattatgggatggatccccaggtggggtagtctccggatggtccatccttttgtcttatcgccaaactttttctctgtaactccttccatgggtgttttgttccctcttctaaggaggagtgaagtatccacactttggtcttcattcttcttgcttttcttgtgttttgcaaattgtatcttgggtattctaagtttctgggctaatatccacttatcagtgagtgcatatcaagtgacttcttttgtgattgggttacctcactaaggatgtggaccttgtatcttaaacagattggttgccttcacacaggaattgnnnnnnnnnnnnnnnnnnnnaccataggtgtgtggattcatttctgggtcttcaattctattccattgatctacttgtctttcactataccagtaccatgcagtttttattccaattgctctgtagtacagcttgaggtcaggcatggtgattcgaccagaggttcttttattgctgagaatagttttgctatcctaggttttttattattccagatgaatttgcaaattgccctttctatcccagtgaagaattgagttggagttttgatggggattgcattgaatctgtatattgcttttggcaggatagccattttgactatattaattctgtcaatccatgagcatgggaaatctttccatcttctgagatcttcttagatttcttttttcagagacttgaagttcttatcatacatatctttcacttcctgagctagagtcacaccaaggtattttatattacttgtgactattgtgaagggtgttgtttccctaatttctttctcagcctgtttatcctttgtgtagagaaaggccattgatttgtttgagttaattttttttctttgaatattttttcttttttattttttttccattttattaggtatttagctcatttacttttccaatgctataccaaaaagtcccccatacccaccccccccccactcccctacccaccgactccccctttttggtcctggtgttcccctgtactgggacatataaagtttgcaagtccaatgggcctctctttcaagtgatggcctattaggccatcttttgataaatatgcagctagagacaagagctctggggtactggttagttcatattgttgttccacctatagggttgcagttccctttagttccttgggtgctttctctagctcctccattgggggccctgtgatccattcaatagctgactgtgatcatccacttctgtgtttgctaggccctggcatagtctcacaagagacagctctatctgggtcctttcagcaaaatcttgctagtgtatgcaatggtgtcagcgtttggaagctgatcatgggatggatctctggatatggcaatcactaaatggtccatcctttcgccacacttccaaattttgtccctgtaactccttccatgggtgttttgtttcctattctaagaaggggtaaagtttccacactttggtcttcgttctcttgagtttaatgtgtttagcaaattgtatcttatatcttgggtatgctaagtttctgggctaatatccacttatcagtgagtacatattggagttaattttatatgtgcatctctttcttaatgttagggaagttttcttctataaatttgttgacgatatttactggccctttaatctgggaatctttgctctcttctatacctgttttcattaggtttggtcttctaattgtgtcctggatttcctggattttgggggttactagctttttgttttttcattttcttttactgttgtgtcaatgttttctatggtatcttctgcagctgagattctctcttctatcttttgtattctgttggtgatgcttgcatctatgactcctattcttttcctaggtatttttatctccagggttatctcccatttggaatttctttattgcttctgtttccattgttagatcctgcatggttttattcaattccttcacctgtttggttctgttttcctgtagcactttaaaggatttttatgtttcctctttaagggcttctagctgtttttaaaggagttatttatgtccttctgaaagtcctctattatcctcatcatgagatgtgattttaaatcagagttttgcttttcttctgtgttgggatatccaggccttgctgtggtgggagaactggattcagaagatgccaagtaaccttggttttccttgcttatgttcttgctgtttgcctctctccatctggttatctctggtattagctggtcgtgctgtctctgactgtggcttgtctcttctgcaagcctgtgtgtcagtactccttggagaccaattctttttgggaggaatttgggtatggagagctgtggcacagggtcagttatggtgcacagacagaaaccaaaaggatccccagctattcctttattcctgtgtcctgatggctctgggtaggtccctcttgggccagggatttgagaagaaatggtggtcttacctgtgctcacaggtgtgtcagcactgagaaaccagatcttgatggtatttgggtatggatcactgtggcacaggatcagctcctggaacagaccaagcttccgatttcataaatgaaataagaagatataaagatgtcatgcatcatgtctggctcagagagtaaattataaaatactttagcaagtttgggaggacaactcaagcttaccctaggggtctcacctagcgcagatgtgaacccggcttctgtaagggggtttctcctagacagacattttcagaaactattttctgtttttcagatcttagcttgagtaaatacatcccgagaattgctgaagacatgacaatccaggaagctaaaaaatttgctcgagaaaataacatcaaggagggcaagatagatgagatcatgcatgacagcatccaagacacagctgagcagaaagtccagctgctcctgtgctggtaccaatctcatgggaagagtgatgcatatcaagatttaatcaagggtctcaaaaaagccgaatgtcgcagaaccttagataaatttcaggacatggtccagaaggaccttggaaaatcaaccccagacactggaaatgaaaatgaaggacaatgtctggagtgaaaactacctcagttccagccatgaagagaggagagagcctgccacccatgatggaaacaaaatgaatgccaactgtattgacattggcaactcctggtgtgttctctttgccagcaaatggtagttgatactcagtgagggtcaaatgactagcaggttccagggactgcttctgttattctctgcagttgctgagatgaaccattttctctgtctactgcaatttttacattcaaatgtccatgaaatttgtattaaatgtgaagtggaatctgcagtgtttgtgtttatattcatatactatgaactgaggagaattataaactgaaacaaatactcgcagttaattgaagaccttccattgatggacagttcttttcctctctatgtggaaatgtataatagaagaaataatttttaaattaaagtatctctttttgcatttctattgctctgttgtcttgcttgttattccatttttctttactctagatgacgacttaaatgctacctgtgcaatgaatgaatctttaaagcttgagttgacctcttaggaggaaattcctttccaaagccttttaataattaaatggttcattctatggctgttactgtcaagaatactttagcttggcagatgtctgatattcttgaggaatctgatgaccgtggtctcaaaagtgcatttaagcagaaagattgcacagcttgggggatttgcctatagttttctctgaggtatgacagttttctctgaggtatgtcctgtccagctttctagttggacagagcagaaggacaaacccagtagagttcagatatgaaactcccacgttttaaggtgagattaagcataagaacatcctgtgccttctttaatgagtttgaacttgaaccaagaactctgagtccctttgaaaaggctttgtattggaggatgtgagtctcttccccttggcttcacccagaggctccgggaatgaccactcccacatcaataaccatggctgtgttctggacttaaagtgaccttttgctccaaagttaccttgcttcagtgattgaatctttttttttgtggtacacatcatgagaaggaatacttatgtcacgtatgggctgcaggaaaaaggactatgtacaaaaggaggtcagggacccccatgggccttgcatacttaaacttctaagcattcttcattagtaaccacagagtcctctggtatttgaccaggccctatgcagtactacattgttagtttccatatagtgatctcgatatggcatacagcacaacattatttgcaattatttcccgtgctctcatctgaatggaagttttcctgcttggattttataccaggggctggaagataactcagtagtagaccaccttcttagcaccctaaggttcttgaatcaatccttactacccannnnnnnnnnnnnnnnnnnnctccttgggtactctctctagctcctccattgggggccctgtgttgcatcctatagatgactgtgagcatccacttctgtatttgccaggcaccggcatagcatcactcaagatagctatctcagggtccttcagcaaaatcttgctggcaaatgcaatagtgtctgggtttggtggctgattatgggatggatccccaggtggggtagtctcgggatggtccatccttttgtcttatcgccaaactttttctctgtaactccttccatgggtgttttgttccctattctaaggaggagtgaagtatccacactttggccttcattcttcttgattttcttgtgttttgcaaattgtatcttcggtattctaggtttctgggctaataaccacttatcagtgagtgcatatctaatgacttcttttgtgattgggttaccccactaaggatgatatcctccagatgcatccatttgcccaagaatttcataaattctttgtaatacgtgagtagtactccattgtgtaaatgtatcacattttctgtatccattcctctgttgaggtacatctgggttctttccagcttctagctattataaataaggctgttatgaacatagtgcagcatgtgtccttattactagttggaacatagtctcagtataagcccagaaaaggtatttctggatcttcggtagtactatgtccaattttctgaggaaccacaggactgatttccagagtggttgtacaagcttgcaatcccaccagcaatagaggagtgttcctctttctccacatccttaccagcatctgctgtcacctgaatttttgatcttagccattctgactggagtgaggtgggatctcaaggttgttttgatttgcatttccctgatgattaaggatgttgaacattttttagatgcttctcagccctttggtattcctcatttgagaattctttctttagctcggtaccccatttttaatggggttatttgaatttctggagtccagcttcttgagctctttgtatatagtggatattattcccctatcagatttaggattggtaaaaaatccttttcaaatcttttggtggcctttttgtcttattgacagtgtcctttgccttacagaagctttgcaatttcttgaggtctcatttgtcaattcttgatcttacagcacaagccattgctattctgtttaggaatttttccccagtgctcatatcttcaaggcttttccccactttnnnnnnnnnnnnnnnnnnnnaaggaatacttatgtcacgtatgggctgcaggaaaaaggactatgtacaaaaggaggtcagggacccccatgggccttgcatacttaaacttctaagcattcttcattagtaaccacagagtcctctggtatttgaccaggccctatgcagtactacattgttagtttccatatagtgatctcgatatggcatacagcacaacattatttgcaattatttcccgtgctctcatctgaatggaagttttcctgcttggattttataccaggggctggaagataactcagtagtagaccaccttcttagcacccttaaggttcttgaatcaatccttactacccaggtaaataagtagatagatagatagatagatagatagatagatagatagatggataggcaggcagacagataattaggaacggaaaggggaagtctacataatgcacagtatttgtagtttctccctagcttttagaacatcagtccactgtattcttgtgttcattgttaatgatatgcccacttctggtctaaatattcctttctaggcaactcctctcttttcctctaatagactctgaaggttcctttaccacactttcttggtgttcagcaatttaacttaaaagagttccaatgtggatttattaatctctttctcctcccccatttcccctccctcttctcccctttctgctgcttctttccctatccttcattatccctgttttcttgagatcttcctctgtggtctaggctggcctgaaatttgtagtaatcctcctgcttcaccctcctaattgttgagattatagtaaacttagttttaactcatttgctaagcagtatgacttttattttattttttatttatttatttttatttatttatttatttgagatagggcttctctgtatagccctggctgccctggaactcactttgtagaccagactggcctcgaactcagaaattcacctgcctctgcctcccaagtgctgggattaaaggcatgctccaccactgcccagctatatttacctttatcccttgagattataattataccatctcgccttccctttcctctctctaacaccttcatttccctctttcaaactcatgtccttatttttctttaatgatgctacatgtgtatatgtttatgtatatgtatacgtatatgtatatatgagtgtacacgcacacacacgcacacacacgcatgcatataccatgtccttgctgttctgaagacttggatcttttctctttgaataactcctgtatgagtccctcaattctttcctcccagagtagagcatcacctcctgtagctttttgaacttctctctgctctgattgtttgaaattatagttttatatgaagatcgtatgtagggagatgtttcattactctcctcaaattaaccattcccattttttatcgttttgtccactgttcgtgacatttctaattatctgtgaatgctcacttatacatatgtttctgcttcctattcatggatattttaaggttacgtggaaagctgtgtctatcagtctcttttcttgttgtaaacaaatatctggcaagaagcaaccaaaggaagaaggcttgccttgtgctttgaatgttcagtcagtctatcatgacaaggaggccagggctgggggaccatggcaactggtcaagctgtgtctgtagcaggaaggagagaccttggagggctggtgctccaccagccttcttcatttccattttattcacactcggatcctggttcatgggatgggatggtgtgcagactctcagtgtgggtcttccctcttctattaagcctatctggagcatacccacaggcctacctagaggtgggtctcttaggtgattttaaatccagccaaggctacagtcacaatcttattccatcatcctactttaaggagtctacagctcttcatgagtccttcctaaaaatacttttaaaattaaattttacttgtgatctcatgctgccaatcataaactcactgtcctcacatggctcccaagaacttatgcatgtgcactgtatacacatttgtgtgcacatgtatatgtctatgtgcacgtactgagatgccatagaataagaggtatcctgatttagcatcctccaccttattctgttgagacagactcttactgagcctggacctagactggcagccagtccaccatctctgcctacttcccattaccaagcttacagatacatatgtgccataactgccttttacaggagttctaggaatttgtactaaggttacctgttgagccacatcactagccatactcatgtgaccttcttggtgtatttttgaatttgaattgtagatctgaatgacaaggtnnnnnnnnnnnnnnnnnnnnggtccatctcataatcagccaccaaatgcaggcaatagtgcatatgccagcaagattttgctgaaaggaccctgagatagctatctcgagtgatgctatgccggtgcctggcaaatacagaagtggatgctcacagtcatctatagcatggaacacagggctcccaatggaggagctagagaaagtacccaaggagctgaaggggtctgcaaccctataggtggaacaacaatatgaactaaccagtacccccagagctcttgtcgctagctgcatatatagcagaagatggcctagttggccatcattgggaagagaggttccttggtcttgcaaactttatatgctccagtacaggggaatgccagggccaagaagtgggagtgagtgggtaggggagcagggagggggagggtatagggtacttttgggatggcatttgaaatgtaaatgaagaaaatatctaataaaaatttttaaaaatatgtcttaatatatcctgaatgtgctatggtaaatgatttctttacatttattttaaaagccatgcattactagtcctttattcctaaaagacagataaaaatggaaatccctgtgtttgttttccctcttactaaatgtaaaaaaaaaaaaaaaaaaaaaaaaaaggtctcagctataaaataaaaggcccaaggatctgtcaataaaatagaacagtgggctccaaacaaatgggaaggaaagcggggccgtggttccacacggccacaagatggcactgtttctccagcactgactcaggtcctggttgaaagtttctccaaagtatgtcacagtttaattctcatattcaacttgccaacaaaagagcaaaacaaagcagatattacaagagttttatctaaaataaggcaatgtctgattctaagtcaacccctttttatggcctagctgtataattttagatttaacatcttggatgttctttatccatatctgtaaattaaagtcacagtccatcagttgttcctataactgtaatgcacaggaatgagacacccatgagaggatgtgataaactgtaatagagtatgacattggttcttaagattaacgttcatagaaaccacctgaggatgtttggaaatgtgtcctgcagatgatgtggctttgggaagggggggggaagcacttgtctcatacccatgagtccctgggtttcatgaacagcactctaaaattcatatccccaggtccagacatgcttcagaaggtttgagactggaaatattcatgtgctgcataattaatcagcaattatgaaaatgtgcaaagtctcgggtcacagcctgaaaggcttcagtatgccaacacccatggaaagaaatatttccaacttagagattaattcactatttaactaaaagttgaacaagcactccaccatttttagactaactaaaggtacgtgtatattatattataatacaaatatatcaagtgtaagtgcccattctcttaagttaatagaatggacttgagaaggaagtgtttgctgggtgacagtcagataacaggaccaggtgcagaacatctggaagtcagctgatagacaggtatgctcatgttgtaggacccagacagagttgatggagtccccctgtgctctgccttgtgacccctatacactcttatttgtctataaacaagtgacttggtgtcttctattaaagactgaagcaagctctactgtactgaaagagagtgagaaaatttagcaacaaagttccatgaacctcttagaattctttgtcacacaactgccaaggtttgttggctaaagccaatggaactttttctaatctcttctcttccttctccgtctgcaaggggtctcagtctggttcccagaaaacatggtgggaaagattgaaggtctagctctaggccagaggccagtgtgttatcctcagaacctgggtgtgcatgctcaaatcccatcttaggtatcaagagtgcacaacaacaaagtctttacaaattgcagcaaaaccggcttcatttggaaatatattcaatactcatcaataaagagagacagcagtttatgttgaaccactaggactcttgatctttctacaactatctatcaaatagttcttactttttacagctaggcactattctaggataacatgctaataacatgctaataacatacaaaaagaccaccaatctggagctggatctctcataacaggacggacaagaatttgtgtaatgattgtgcagaatactatgttatgagattataaatgctccgatccgtttatcaggacagggagaattgaggcaaaggtagggagagagagaaaaaaaaagcaaggtgtgttactactatatagagtggtcaggagaggcctcagtgagatggagcaannnnnnnnnnnnnnnnnnnntccctacccacccactctcatttcttgaccctggtgttcccctgtactggggcatataaagtttgcaagaccaaggggtctctcttcccagtgatggtcgactaggccatcttctgctacatatgcagctagagacacgagctctgggggtactggttatttcatattgttgttccacctatagggttgcagaccccttcagctccttgggtgctttctctagcttctccattggggactttgtgttccatcctatagatgactgttagcatccacttctgtgtttgccaggtacttgcatagcctcatatgagacagctatatcggggtatcttcagcaaaatcttactggcatatgcaatagtgtcagggtttggtggctgattatgggatggatccccaggttgggtagtctctggatagtccatctttttgtcttagctccaaactttgtctctgtaactcctttcatgggtattttgttccctattctaagggggaataaatatccacacgttggtcttccctcttcttgattttcttatgttttgcaaattgtatcttgggtattctaagtttctgagctaaaatccatttatcagtgagtgcatatctaatgacttcttttgtgtttgagtttcctcactaaggatgatatcctccagatccatccatttgtccaagaatttcataaattcattgtttttaatagctgagtagtactccattgtgtaaatgtatcacgttttctgtatcctttcctctgttcagggacatctgggttctttccagattctggctatcataaataaggctagcatacattttcattggtttaaatgcttacttagacctcttagcagttcagtgcttggatgaataccttggttctaggcagaaagaagataataaactgtagtgagctgatttgctgtattatataaagtgctgatcctatgaagtagttctgttggggtatgacaaaccccttccagataccctccagtggaaggctccaaagatggaaacatactgacggaggttgtgctgtcacctgaaacaccttggagatctgtgatgtagatgttatgtatatttataagcttttgggacagaagggttttccttcagatatagtcaactttgtattttaaagtagaaactgggatggggcgagggcaggtagctcagagcgtaaagcatttggtgcgtgtgctttccagcctgaatttgcatccccagccctaaaagaaaccagtcactgtaatggtggcacatccttgtaaccccattgttggaaagcagagacaggtaatgccagaagctcctgaccagctagtctaccagaaccgtgggagtaagatgtgttctcaaaccaaagcggtggaaagcgatagagggggacatcctaagtaagaatggctacatgtgcatgtgcacctgcgaatgtgcacgcatcacagacacgataattaaatatgttagaagggaagatgttagttaaccaagtgactgcaaggagacatgctgattgtgtgtgtgtgtgtgtgtgtgtgtgtgtgtgtgtgtgtgtgtgtgtgtgtgaatatgatgtatatgatgtattcagcttttatatcacctgtttactttctagtcagaaagacaagatcttcattctagacacttcaccatcagtaaaataacggtcaatctctaactttgtttctaatataatactgctttagggggaagattttttagtgagaggagacacgtccttgatactttgagcttcattagaagatgcctccagttacagggtagaaggatctacctgagccacaagtccagaatcatacaagtggacaaaatggtcctacaccccagtaaataaagtgagaaaaaatatgaatcacttgactgttggttactatcacatgacttaattaccttgtttttgatgagtaaatccatgaaatgtaggataaaaatgtctcagctccagatatatccatttgcctaagaatttcataaattcattgtttttaatagctgaatagtactccattatgtaaatgtaccacattttctgtatcaatttctctgttgagggacatctgggttcttaccagcttctggctattataaatagggctgctatgaacatagtggagcatgtgtcctgagtgaggtaacccaatcacaaaaaaagtcacttgatatgcactcactgataagtggatattagcccagaaacctagaatacccaagatacaatttgcaaaacacaagaaaatcaagaagaaggaagatcaatgcatggatacttcattcctctctagaatagggaataaaatacccatggaaggagttacagagacaaagtttggatctaagacaaaagaatggacnnnnnnnnnnnnnnnnnnnncaagctctactgtactgaaagagagtgagaaaatttagcaacaaagttccatgaacctcttagaattctttgtcacacaactgccaaggtttgttggctaaagccaatggaactttttctaatctcttctcttccttctccgtctgcaaggggtctcagtctggttcccagaaaacatggtgggaaagattgaaggtctagctctaggccagaggccagtgtgttatcctcagaacctgggtgtgcatgctcaaatcccatcttaggtatcaagagtgcacaacaacaaagtctttacaaattgcagcaaaaccggcttcatttggaaatatattcaatactcatcaataaagagagaaagcagtttatgttgaaccactaggactcttgatctttctacaactatctatcaaatagttcttactttt

SEQ ID NO: 1289 - DNA, 1480 bp, Mus musculus
gccgcaggctgcccacacaggccgcccgctgttttcccttgctgcagacatgctgtggatctgggctgtcctgcctctggtgcttgctggctcacagttaagagttcatactcaaggtactaatagcatctccgagagtttaaagctgaggaggcgggttcatgaaactgataaaaactgctcagaaggattatatcaaggaggcccattttgctgtcaaccatgccaacctggtaaaaaaaaagttgaggactgcaaaatgaatgggggtacaccaacctgtgccccatgcacagaagggaaggagtacatggacaagaaccattatgctgataaatgcagaagatgcacactctgcgatgaagagcatggtttagaagtggaaacaaactgcaccctgacccagaataccaagtgcaagtgcaaaccagacttctactgcgattctcctggctgtgaacactgtgttcgctgcgcctcgtgtgaacatggaacccttgagccatgcacagcaaccagcaatacaaactgcaggaaacaaagtcccagaaatcgcctatggttgttgaccatccttgttttgttaattccacttgtatttatatatcgaaagtaccggaaaagaaagtgctggaaaaggagacaggatgaccctgaatctagaacctccagtcgtgaaaccataccaatgaatgcctcaaatcttagcttgagtaaatacatcccgagaattgctgaagacatgacaatccaggaagctaaaaaatttgctcgagaaaataacatcaaggagggcaagatagatgagatcatgcatgacagcatccaagacacagctgagcagaaagtccagctgctcctgtgctggtaccaatctcatgggaagagtgatgcatatcaagatttaatcaagggtctcaaaaaagccgaatgtcgcagaaccttagataaatttcaggacatggtccagaaggaccttggaaaatcaaccccagacactggaaatgaaaatgaaggacaatgtctggagtgaaaactacctcagttccagccatgaagagaggagagagcctgccacccatgatggaaacaaaatgaatgccaactgtattgacattggcaactcctggtgtgttctctttgccagcaaatggtagttgatactcagtgagggtcaaatgactagcaggttccagggactgcttctgttattctctgcagttgctgagatgaaccattttctctgtctactgcaatttttacattcaaatgtccatgaaatttgtattaaatgtgaagtggaatctgcagtgtttgtgtttatattcatatactatgaactgaggagaattataaactgaaacaaatactcgcagttaattgaagaccttccattgatggacagttcttttcctctctatatggaaatgtataatagaagaaataatttttaaattaaagtatctctttttgcatttca

SEQ ID NO: 1290 - DNA, 984 bp, Mus musculus
atgctgtggatctgggctgtcctgcctctggtgcttgctggctcacagttaagagttcatactcaaggtactaatagcatctccgagagtttaaagctgaggaggcgggttcatgaaactgataaaaactgctcagaaggattatatcaaggaggcccattttgctgtcaaccatgccaacctggtaaaaaaaaagttgaggactgcaaaatgaatgggggtacaccaacctgtgccccatgcacagaagggaaggagtacatggacaagaaccattatgctgataaatgcagaagatgcacactctgcgatgaagagcatggtttagaagtggaaacaaactgcaccctgacccagaataccaagtgcaagtgcaaaccagacttctactgcgattctcctggctgtgaacactgtgttcgctgcgcctcgtgtgaacatggaacccttgagccatgcacagcaaccagcaatacaaactgcaggaaacaaagtcccagaaatcgcctatggttgttgaccatccttgttttgttaattccacttgtatttatatatcgaaagtaccggaaaagaaagtgctggaaaaggagacaggatgaccctgaatctagaacctccagtcgtgaaaccataccaatgaatgcctcaaatcttagcttgagtaaatacatcccgagaattgctgaagacatgacaatccaggaagctaaaaaatttgctcgagaaaataacatcaaggagggcaagatagatgagatcatgcatgacagcatccaagacacagctgagcagaaagtccagctgctcctgtgctggtaccaatctcatgggaagagtgatgcatatcaagatttaatcaagggtctcaaaaaagccgaatgtcgcagaaccttagataaatttcaggacatggtccagaaggaccttggaaaatcaaccccagacactggaaatgaaaatgaaggacaatgtctggagtga

SEQ ID NO: 1291 - DNA, 45121 bp, Homo sapiens
cttagacttaagctcaaagcctccattcaaagaaagtggccaaaatgtcccccctctggagcaagttgcattctgattaggaatgagactcaagccatataaagtcaagtacagttacaaggcaatgataagaaagaatgagatagctcaattccaaatgaatctggatttatctgatatgtaaatttaaaaagagagagataattttcccagactccaaatgccaaatcagtttcactccctcctcaaaagtgctgagaaagttctaaatttggaaaggtcacaaagggataaagtgagtcagaggaggctttggtttgccttatatgaaaagtgggatttggactatggaggaatagggtccttccagaggggatgtttgaatgacagagtaggaacagggcatggggaggccaactgcgaggaagtcagcacaagcaaagggcaggcccagcaatatccaagagagagcggggccagtccacagggtgttcagtgtggagcctccagacctgtgtcctaactcgagctctgccacatactagctgtgtgcaaattagttaaactcacctaacctatgtttcttaatctgtaaaatgaggataatattagatgttaagattaggtgaggatcaaatgagacattgtgtgcataaagcacttttcctgtgcagttaaacccttgataaatattagccacttattaaccatcgggttaagagagaaatgacttttttttttttaaagaactggccattgctttatcttccatcgtcgtgatttatactttttaactatattcacaccaggaaaagttgatagtaaatttcattttgggtgaggtctagactagtatccgtggaaaggaaggcaaattgaagaggtatgatcctaggacagaggaagaaccaaggtcaaaacagggacatttcccaattcaatccaacagctgctttgttaacagtgccacaagcagtggggtgggcagagtgggagacgcatcatatcctgggaagggaacactgtagggagggagagagaggctggatgggggaaacggtagataaaagattgggcaaagtaatttagtcccagtcccagatactacgtgtttcagtctgtgctcgtgggtatgtaaaggtttcagatgggctttccatgaaaaacagcaatgaggcaaaccgtcccattcactaaaaagacaggcattatcatgatactgtgcaaagagcccaggctttagagtcaagcaaatcttgatacctttacttgacacatgaacttgatcgagttacctctatgtgaatcaggaaagttattctttccctgtaggtgtgggtatgagaattaaataagttagtatatataaaagggtctaacacatagtgagtgcttgattaactggtatgtgttagttcaagaaggcagtatgttgttatatgcgagaagcaattgctttggttcaaaccccagctctacagcttactggttgggtgactactgcaagatcctcaagtgcttgggcccatgtttgtttcacctatattgtgcacacaataagaagacctacctcccaagatttttatgagcattgaatgagatcatatttataaaacccactaaatggtacctggctcatactaagtgatctaaatgaagaggtattatcattaagaagcaattaaaagttgcatgtgtatgaagttaacagcttttaacataaaagacaatggattatttggtaagagatctcaccgagcttaaatgtgtttttttctttttttttttgaaatgaggaaaggaagacataaatggcagaatatgtggtacagaactgtaagatacatgtcccacgacagaaataaaaaaggcagagattcactgaggggggaattcatggacatttatggtcacattatcctgattggctgagggagtcagcaggcttctagccagttttcttgctgttcacagaaataaaagctcagtgtctttgaaaatgaactaagtttttttttctttttcttgataggaaaatgtatttatgtagtcaagtaagacttgtttctgctaagtaaaaattcagcctaagcagtgtaatatgaagctaaatggagactggatacaaatatgtttataatgagattactgaatttgttgatttccctacatttcccatctactaccactaaagaaatgctgtaataataatataactggccaaagtggtaaaagtggggttaattggtccttatctgtttgaggtaaacaaccgaactgatgagtggtttccctgagcaaagactcttgctacttcatgtgtcctttccagaacgtggcatcaacatcacatgggagctggtgagaaattcataacctcatacttagacctaccgaatcagaatcttaatcttaataatattgacaggtagtttatatccatattgaggtttgaaatgcactgagttagagtgtggagttatggccacactgtcttaattagattatctttatttcaatccaatttgcatggctatgtgagctatgattcttagaggagtgaacataaacagcaaaaattcttacttagcagacttacccagtgcaagaaagagttcccttatctcactgtattatgatcttagtcaatatgacccggaatttaagaaaataatatgacaagagtatggttttaatcaaccggaaaccatgtgttcaacagaacaacaaaacaagaaggctttgtacttacttagggagtttacatcttgatgataaggccactgaggtaactaaagaggaaatggattcagcataggctttggaagttcacttctgttacctagtaactgtgtgactttgggcaagtctttccaagtttcttttctataaaataggatggtaacaggacctactttacagggagttgtaaggtttagataagttaacaggttatgcaaaaaaaaaaaaaaaaaaaaaaaaaaaacacacacacacacacacacacaaatgttctggacattttataagcattagatattactgatatcttatttttgtttatttttaaatgtctgtccctttaaaccattcctttcaacatatttgtgtggtttaaataaaaataagtttgaagaaatttcagaaagaactttgataaacccattgaatgacttggaaattccaaggggatttcaaagccaggtggaggaatgcctgcttagtgtctttcctcagtgcaaaggctgataaaggcctcaatttctccctcagtttactgtgatcagagacttaggctgcctagttatccttgttgcctggacaaaaaactctttagatgcatgcaggtttgtgtagagtttgtggggaggtttcagatggtaaaatgcctcttcctacctcaggtgaggggagggttactatcattcctttttcacagagctattctagttctgtttataagtagtgttctttgtatagtggatgttgagcaaacacttgttaaactataggaagttataacatcgggagaatttctaacaactgcaaagtgttctgatatgtaataaattgccttgagaaatagtaggagccagtgctggaaggagtcaagctaaggctggtgtagtctcctagggctgttgtagagaagagtctaaagtgggaggtgttgatcttatggtcccagaggtctctcccacactacctttctgcctgtataggtcagaatctattaagagtgagtaggaatggattacaccccacagtcatgaagggccttaaatgatagtagcacactagtgtcatatgtcaagtggcaaatgacactagcaccaaatgtgattctgcatttaagttctaagtattaaatgcatctatttgctatatgaaaacataagatatcccagtgtttgcaaactggttcaatattgtgttgatttttgttttgctttaatacactaagggaacttcaaaaggctgatgtggtccatgctctctgagccaggcctctcttgacttcttatgtttagttattcatgaaaccactgggcctgtctaaatggccaagtcatataggaagagacagagtgaaagggagagcaagagctagagtgagagaaagagagagagacatcttctcaccttcagacctgatcagaggcaataatgggagaccatgggaggggagagcctgatctgatgattccttttcagttattttctggaaagtttaaaaaatatggtattcttcatggagaagccaagatgttaggctgcaggcagtgcttatgctctctagcctagtgaggaggaaagcagtataggtaaataaaatgacatttagttggtaatataggcagggcctatatcaactgccacctataaaaggcgttggtgatggtctttagggggccattggcaaattgctacaacaaaataataaaataaataaaataacaaaatccaagtttatctcccagaatctatctgggcatatcattactgttggaaagacttatgtttaccaggtgagaaaactgatgctgagaggggttaaatattatgcacagcttctcacatctagtgaagtaactgaactaggatttatatctagggactctgtccttcataggacaagttgctaatttgggggtgttctcagggagaggaaaatgtctatatgctcatatgcacagattatccaaatcaaaactctttctccccattgtcctttctcagttgaactagatgttaataccactattgtattagtcgactaagattgccttctgcagaaaaccacctatgtctcctttctacccaagtgctctggggctcctcccctgcccattctcctccaacatcccattccacattctctttctatctctgcaggactccctgtagtcctccctgcccatccattatctccctcaagctgtcccctcagccttttctaacagggaaaggctggtgccctggtaaagagtcccccacccccatcccactccctggcactagatgggcttgggagacaatgactgcccctccctcatgctgttctgatgtctcttgttccttccagtcacctcccttccaggcccatgaggagggcctgaggcccacactagctagtcttttctctggaggttgtttgggggcagggaggaagtctaaagtagagagaaagcgctgccatgccttaagccaacctttccagaagtataatgcccttgccactagtagtttgggaaacaatttttattggcatgcaggcaaatattttgtttcaatagtggcatatttatttttatggataccttctatttttggcaaggaatgctgattttccatttatggttataatgtaatgttttattttaaaaacaaaatgacttagggaacaaaataagttgacttaaaaataaattattagttaaatatatatttagtatatacaagtagactacagaaatggcaaaatagattgaagttgaagaaacattgccttaagctaagcccactcaggatgaaattttatctgcccccaaatcaacatctcttgaaaagtggtccctatctttccttgtgtcagttcttaacacccagggggtaggcatgcttctcatgtttgttttcatagaatatctgtgttttcaggggaccaccatatgcaaaaatgtcaggggaggggtactcaattggattaagaagccagggcccacagaacagatgttttcaccctactaacccaattgctgtctgctttttagttgccacagtctaaacattctttaatgcattgtctttttcagtcattgctcaagaggtaggttagtataccagttttcatagtgggaaaaattaggagacttaataatttgctgcatatcttggtggccaagttttccagccctggtcagttaggctttaggacacttttcttaggcttcaggaatgtgagcatggaagtagtacagaaaggaagtagtacagaaaggaagtaatacaggaaggaagtagtgcaggaaggaagtagtgcaggaaggaagtggtacaggaaggaagtggtacaggaaggaagtagtgcaggaaggaagaagtataggaaggaagtagtggaggaaggaagtagtacaggaaaagtggttgtaagccatttaacttactttttttcatctgaactgtgacccccaaattatcaatttgtcttgtgaagtcacttcatttaggaaaagcaatgtaaaagtaaaaattagtatttattgtgtgtactaggtgctttgcatatgtcatttctttaatcctgtaggaaataatatgttctccaggaggtgacaatgtctatatgattagattcacagattacctatccaaatctaagatctccgtcctctctcttcctttcccaagaacccatacatatttctattaattggtagaaataattattaatagactttgtcacttggccactgtgggctctgacgccctctagtgacagaaaaattctttggtagaagaagtaatatccctagatagcagtctacagaattgtttaagcaattatctttacttgagcttgaaactagaatagctaatttgtaacaattaacttttgtaacaaaagaattattatactgatcaaagttctgataatttatcagttaagattttttcagttgtaagaatctagcttaagcagaaactaagaatttgtagagttgggtaactttgggtggtccagggttcaatttaagaaccaaatgcatccagaacttggatagctctaccaaccttgatctttcagcatggtttcctctcagtgtggtttcctctcagcatgagttgactgttttcagctctggcagggccacaagctcccttcacaaccaaccacatcagtttcacatctcacatatttctacttcaaatccaatgaaaaagaaagggtttgtgtcccagtgtttccagtaaagatcccaaaatctactccaactgaatgtgatgtgctgattggcttaagccaagtcacatttcccacccactacctccctccacctacacatatacccaagccctgggattggtaccaatgccactgtgatggttaattttatgtatcaaattagctaggccatggcacttggctatttagtcaaacactatcttagatgtttctgtaaagcaatgttttggatgggattaacatttaaatctttacactttgagtaaaacatttgctttctataatgtcaataggccttatccagttagttgaaggccttaaaaaagaaaaaaaaaaagactgacttccactgagtgagtgagaattatgccagcagacggcctttggacttgaactataactttttcatgggtctccagcctgttggccaatgctaaagttttggacttgccagcctctacaatcatgtgagccaactcctatctatctttccatttattcattctcttggttctatttctctagagaaccctgactaaaagaaccactcacatcaaatagttaagaagaggggagagggacagtttttctaaagacaacttggaagtactattaccagaaggaagaagaaggagaaaggcaggataaacagtcatggatatacactatagctgggagttattaaaatcaacttattgcaatttagtaaaaacaatttggttgacaacattttttaaacattaggaccaaaggggaaaagaacaaaagtcttagtggtaaaaagatgtagaagtttttttttttttttttttttttaatcttaactcttcctgtttttttacatagtcaagattcttgtttaagtgttattcagaatgttcagaaaccaggatatcttttgagtagaagctttaacttatatggtatggtttgaataaggatggttgtccaaaacatctccaacatctgttggagtgcctgaaattctattattaaaattttatttctttgcccttgaaggcctgaggactctcaggaatatgctggtaaaataaaaataacctttagagatgcccaaactgttttccccagaacaccagcattcattaggtgttcattcaatagattcttcaaaggattccaaaggcaaagaagtttggggaacagtatatataattacccaaccctttgacattagcatactaagggccctgagaagttttggattaagaaagttttcaaattaaagtaacccagaattttctaagattatttgaccatgaaacatatgtctccccacaaagcacatattcctatctccttgaacttgaggataattagacgtacgtgggtagagggtaggggaagggggtatggcatagaaagagcaggaccttgggagcaagaatatctaagtttaattcctgactctgctatttattaactaaccatctttgccaatgttgcttaagcttttttggctacatttttttatttgtaaagtaagtttaataatcactcatctcactgggctataatgataagtattaagtaaggaagatccacatatgtgagttgctggcttataattcacactcaagagatactgattttgtcaattgtcctttcccctttttttctctcttccctccttccattccttcttcccttacctctcctttccttccctcacaccccttttccttccttctttttacatttttttatttaaatgaacttttcattttggaatagttttaggatttcaaaaaatttgcagagataatacagagaatgcccatataccatcctccttatcccacttctttttgtgtctattagatgctcagagtgtgtgcacaaggctggcacgcccagggtcttcctcatggcactaacagtctactgaaaggtggaacagagacaagcctatcaacacctacaagactggtggtaagtgcagtgacagatgcaaaacacagggtgatggaaagccctcaggagggtaacctaacctagatttgagggcccaaacaggctccagaagaaaatgtcaactgagaggaagcctgaaggatgaacagtgggctaagcaaagggttattaatgtgttattaatgggttgaatctaattgggaagggagagaggttgcagagtgaggtgcagagcttggtggacgatgccaaaggaatactgaaacctttagtgtgtccagtctggaactgcatccaaattcaggttcagtaatgatgtcattatccaaacataccttctgtaaaattcatgctaaactacctaagagctatctaccgttccaaagcaatagtgactttgaacagtgttcaccagagcacgaaagaattacaagatttttttttaaagaaaattggccaggaaataatgagtaacgaaggacaggaagtaattgtgaatgtttaatatagctggggctatgcgatttggcttaagttgttagctttgttttcctcttgagaaataaaaactaaggggccctcccttttcagagccctatggcgcaacatctgtactttttcatatggttaactgtccattccagaaacgtctgtgagcctctcatgttgcagccacaacatggacagcccagtcaaatgccccgcaagtctttctctgagtgactccagcaattagccaaggctcctgtacccaggcaggacctctgcgctctgagctccattctccttcaagacctccccaacttcccaggttgaactacagcagaagcctttagaaagggcaggaggccggctctcgaggtcctcacctgaagtgagcatgccagccactgcaggaacgccccgggacaggaatgcccatttgtgcaacgaaccctgactccttcctcaccctgacttctccccctccctacccgcgcgcaggccaagttgctgaatcaatggagccctccccaacccgggcgttccccagcgaggcttccttcccatcctcctgaccaccggggcttttcgtgagctcgtctctgatctcgcgcaagagtgacacacaggtgttcaaagacgcttctggggagtgagggaagcggtttacgagtgacttggctggagcctcaggggcgggcactggcacggaacacaccctgaggccagccctggctgcccaggcggagctgcctcttctcccgcgggttggtggacccgctcagtacggagttggggaagctctttcacttcggaggattgctcaacaaccatgctgggcatctggaccctcctacctctggtgagccctctcctgcccgggtggaggcttaccccgtcttagtcccggggataggcaaagtggggcgggcgcgggacgcgtgcgggattgcggcggcagcggcgcacgcgggcacctgggagcggcgggctgctgcgggaggcgttggagactggctcccgggggctgttaggaccttccctcaggcccgggtgctcagaacgctggaggacttgcttttcttgggccttgatgcgaagtgctgatcccgctgggcaggcggggcagctccggcgctcctcggagaccactgcgctccacgttgaggtgggcgtggggggcggacaggaattgaagcggaagtctgggaagctttagggtcgctggagggggaccccggttggagagaggagcggaactcctggacaagccctgacaagccaagccaaaggtccgctccggcgcgggtgggtgagtgcgcgccgccccgcgggggcggggagagagcctgcagccttcagaacagatattgctcattttctggcagttctcagacgtaggaaataagtcagcaccgaagcagtggttaagccggagggctcggaagaacggcaccttttctttctcgaaaaagttatatgggggctgaatgagcttctggaggcttgtttaccgttttttattgtcacacagaaaaggaaactgccttgtctcccttccgggaattctctctttaagactgtaagtcgctgcctgagtggtttcattttgttttgtttttctgcccttctctttcttcttttgccctttcttagcttgcactcccatggtgatttctgcttggtctcctgctggggttggtggtactcgttcccaccgcacagaacccggcgcctattattggccaagaaacttgagcagcctgttttgaaaagtccctcgctcagaaatgccagcttgcagatggctaatcaaagagacgtggatccaggaggctcatttgagtaccggagcctctgagagtccatggatttttattttattgggccccaacaaagtgccaggcatagcgagagaagtgtttacaaatgtgatctccgcggattctcacgagagccatgtagtggggaagataaccacatccccattttacagatggcgaaatgaggttcagagagcttcagtaattcagccaagatcacacagctagtaaatgggagatatgggattgaactcagatctaattccaaaactcaggctgttcgctgattgcatctgatatccagattacaccaagaggctgagatgtctgggtccattttatgattagaaaaaaaaatcctgttcctttcagaaatagtgtgcactatttgggattctttagaaacttccttggagaaaattaatgattcaagattgagaaaacatttatacaacctcaggccacactcttctctctcttgttattaaccattgcaccactgctatgttggctgctttgaaaatctcatagtttttggacagcagtattagtaaagtgtaagaaaattgtcaaagcttggagctatgcttgttgaacttttgtaccaatagcacctttaccagaggctgcgtgtttaaagcccgaagaaaactttgcttttctgaaagaatacacacacacacgcatatgtaaatattcatacatttatgtatatatacatattataatacctataagttaggtataacttatatttgtatatgatatatggcctaggaaattaaggcttattaaataaaatttataaatgcagatgagtcaaatacaaagatcagacataactctatcacctaagtaatcattgtttacgttttgcagtttatcttccatttctcccctctaatatgactcttttaaatttagttacacagaaattggttttgcgctcacgacatgcctaacatcaggcctttatccttaaagaagtttcaacactcttgtgtcacctcatgtgtctacagaaaatgtttgcttttatgccttcacggttatgttttcttagtagtagcaataaataaaatagatgcaaagtgctaattacttggaatacagaagcaaattttaattctattaatgggctggacatagatgggtggggagctgttttctgcttttcccctcttcccctagtcctctgactctggtgataactatagtcaacaagtatccccatccttaaccccttttgcttctctttctctttccttctctcaaccttcctggtgttagttttctctttcctatttctgagtgtttttactccgacacttacaataaaaaagtttgaaatcccaaaaagttgacaaatttctaaaggagacagaaaaagagtcaaacttactttacaaattaatttgagaaatagctgtgggttgcattttttttttttattgtgcatgaccctgttattggccaagaaacttgagcagcctgttttggaaagtccctcgctcagaaatcccagcttgctaattgaagggatgtggatccatgaggctcatttgaattccgaagcctctaagagtccatggatttttattttattgggccccaacaggttttgtcttgcattatttaggacattggccaggcaatcactggacagccagtttgctctcctttacattttgtagaatggttatcttatggtcaaaggaaagggagagggcctttggaaaataaagctgtgtatttacaagcagtcatacagaatagttttgtggggaaaataaagaacagttatttaatttgtaatttaatcatttttcttaaaccaacccaaagagcataaaatggaatatttatttatttttgtagcttaatttgtaatttaataatttttcttaagccaacctaacgaacatattgggctgtttattttcatttttaatgggccatatttacatcacaaaggacttgagaagtcttacaaatacaataaaatgataaaatatgaattaagacattagcaaccaggatggaaaaacacaaatttgtaaatgatggccaggtttgcaagcaaaaattaaattgataaatggcagcacccccactaccagctatagttagactgatgaaaaatcctctaatgttcatgcctgaaatacagttaccacccttagcagcaaattagaggcaaagaagttctggaatttggacgttgtctctgagtaagctctttgagacactggacaagtaatttccttctgaatactcttatactgacacataggagaagtgtcagtgtttcaaaggaatctctttgaaggctactacattgctttaggggtgccagattaccagagtaaactgccagtttgagagaataactgtttcttaagagatggtctgaaacctaagtaaggaaatccccccacttgaaagcccctaggaagttaattgcttttggcaaattatcttgggccccaaaagtcccttgatgagcacatgttttgtaataggtactaaagactatttacttatgatgaaaaataaaataacacaatttaaaacttgaaattgataaaaagcaacttgaaaccaaatttaggacagtgaacccatccctttcttatttttaaataggtaaatatagaaaaaatgaccacatgatgtgaaacaaaaagcaaatatttaaaaactacatttatactttatctcaccacactaatgtaaagaattttgattttacttataaattcttagccttgtctacacatatacataattgcatgtttaatttgagctatatatagtctgttttttgttcctttgcatgttacacaaacctttttctatttccacataatttttatctcatattttttattggatacattatagagagagcatttattaaatgagctgggattactataatttttattatttattttttaatttattacttatttttataatttactattgaaaaaaagcatttcttaaatgtactgggatacatatatatatatgactttttcttgttactaaaaaattactcatagaacttacatattaaaattttaggacttgtgatgaaaaataataaaataatttaaaacgataaaaagcaacataattttatatgttgtaccttgtacttccttataaggtacaacactacaatagccttagtgtgtagttttctttttgctatgtatgtatatatatattcataaaagtggaaaaataacatttaataaatcctctttattttctggaaaatccttgctttaaaaaaagtctttagctttttatatagttctacttctaacaccaattaaatatcttcaattcagtctcaagcaggaacaaatcttcagtccacttgcctacctttactgtctttgaagtgacagtgtgagtagtaaagcccaaatcagagagaaattgacttttgtaagattggtaacttcaccttccccggaaggaaatgaggtggttcttccctttgatcacaactgctttcttgatttgaaataaactgttgtacagcccagtcaccccatctttagacatttagaaatggcaatcatagttatataggacaactagcctgagtcccactaagtagaaatgatagtgaatttagtataagattatacctttaggctgggcaggtgactcacacctgtcacccagcacttcaggaggccaaggtgggtggatcatggatcacttgagattaggagtttgagaccagcctggccaacatggcaaaaacccaactctactgaaaatacacaaattagctgggtgtggtggcgtgcctgttatctcagctactcgggaggtcgcggcaggagaatcactggaacctgggaggtggaagttgcagtgagccaagatcatgccactgcactccaggctgggcgacagagtgagactccgtctacaaagaaaacaaagaaacaaaaaatcatacctttagagcaaggccagccttgtgaattagcaaatctgactacaaattcaatcagcagatgtactcagcccagcaaagtgagcaagcttactataggttgtgttaaggcatggactgggataaactggcaaaattagagtaaatttgacaatttgacattggattcattaatgatagcctgtccttcaatgaagtcaggcagcattgtgtttctattcacctctgtgttttgtgaggctataaaaatataagatatgagaaatgtgaatactttttatttgtgagggcagatatcttgaaaaagagagcgagaggaagtcagagtatgcgggtgaagactcttgtttttttgctgaggatttagctttggtttttagccattctcacagagatcattggtcctaattaactggttgttgttgttttttttcatgtgaatgtctgtaaggtttcaggcttgattttaaaaattgggcctatactcacagaaagacaaatactgcatgatctcgtttatatgtggaatctaaaagttttgaatccataaaagcagagagtagaatagtggttaccagaggctagttgggggcaaagttgggggatttagggagatattggtcaaaggatacaaaatttcagttaggaggaataagttcaagagatctagtgtacaacttgatgtctatagctaataacaatgtattgtatacttgaaaattactaagagtagattttaagtgttctcgccacacacacacaaaagaaaatgataagtatgtgaaggaatgcccaatgtaattagctcgatttagctaattatcttccaaaatatgtacataattatcttccaaaatatgtacataattcaagacatcatgttatataccataaatatatataatttttttatttgtcgaataaaaataatacaaaaaaaccctgggcctatactgcccacaggtagtggccacaggcagagctggtcccaagcccctccctctctctgtagtcccttatcccaggttgctttattcttgtatgacccacgtggcccctctgggcttgtaagggctctggggctgtattttaggactctatagcccttacattacccatttcctctaccaaaggtcatttctcttatcttcaagcttatttttggaagggtcattatttcttcatgagaagtcaaattctgatttgcaagtgctgaacacagatgccattagtctataaaactcttatattctcacatgtaaatgtagtaacctgctaacctcagattctgcttcctctaacctagttgccctgcaactgtgatgaacctcaaaatcaccaagggtacttccccattctcagagatcctgattccttaggtctatgtaggggccttagcactttttattaaataatgcatcactacaggattctgatgtctgtcggggtcttgagaactatttttctgactctagcactaaactcaaaatgtaatttcagatggaatttcctaggctcattcattttattttatttatggcttggccagtcatggatctaatcagtaacttgcaactgttgcttcaactacctctgtcctggactttccagagattggctttaagaaagaaagaggacatccctgggataagattaccatgtgtatttttatgtacacattttgaaaaacatacaaatgaatgggatctttgcttatctcttccatgtagaaaaatttattttacttctatttcaggttttcaataatgtagtaggacaagatgacatcactatatccctgttttttacacagatatattagagatgcattatcttattggaaattttaaactattcaataataaactattagtcttttagaatttctttttcctcaagtgttgataagtaactgaaagtctacaagcagacaagcagaattagtcggtggaacttcatttcttgctccatttttgtcctcagcagtagagggtggtgagatttcaacccagcctagcaggaccaataagtctggaaagaagtagctctagttcatattggcacctgctaattctagttctgaagaccatgggaaatctcttgcctatttagctcagtgatcatccaagatgggaaattcttgggctcagctgtgagggatcccaagtttatatgtaccactaatgtctcacaaatcaagaatccaagagaatcaagagactatagttcattccttatattaaattcttaggactgccaactgggtggctacagttttgggggctagaagtctgatatcaaggtgccaactggactggttccttctgaggaccacgagggcaggatctgttcaggcttgtagatggccttcttttccatgtgtcttcacattatcttcctctgtttgtatgtgtgtccaaatttcctcttctttttttttaatttagaaatttatactgtctacaagctttatatagctttagttaaaaaaaagcaaaaaaaaaaaaaaatcaaaacaaaaacagtgaagccaagacactcttccaaagtctggacccttccggccttccaaatacaagagctctggaagttgtatataccaaatttcctcttcttaaaatgtcaccagtcacattggattaaggcttaccctattaacaccattttaacttaatcacctctgtaaagaccctatctcctgatacagtcacattcggatgctcaggaagttagggtatcagtatcactatatgaatttgggagttgggggaggacacagtttagcccatgacagtcctgaatctcctttgctagatgcatgactgtgggccagtcacttcaccagttgggatactgccatctctatcagaaaaggggtttgggctaggtcatctataaagtcctttctgctctaaattgtaaatataatgagataccaacatttagtttaattgtttaaaattttagaagctaactggatgctttgctggtgtcaacactcccctttacaaaaaaaaattcggccgggcatggtggctcacgcctgtaatcccaacactttgggaggccgaggcaggcggatcacggggtcgagagattgagaccatctggccaacatggtgaaaccccgtctctactaaaaacacaaaaattagctgggcctggtggtgcacatctgtagtcccagctactcgggaagctgaggcaggagagtcacttgaacccgggaggcggagcttgcagtgagccgagatcgcgccactgcacctccagcctggcaacagagcgagactccgtctcaaaaaaaaaaaaaaataaataaaaaaaaataaaataaaataaaataaaaatctcactttctgtttctactgttctctcaagtacccctctgccttctgttacttctttgctgcattctgagaggaatggggtggggagcactctttcctgtagaaccccataacccatctattttcatcaatttatttgaaattcaaagccaggggttaaaatgtccactttcaatttgagatgtctaactttcagataaatctattaacatgcatttctaagtgacttttaagctaagcattttattttattgagctcgtatggaagggtaactattatacttgtataataaagtgcactttcaaaaatactcggttcaaatgtaaaataatattcgtaatattttaagacaaacctcctagaacttatatgtgtctttcttcccagagcagtctctatgggtgcctaaacaatactgcattattagatttttttcagtttataagccacacaagaaagttaacccatgtcatctctagaggcataaaaatagacagttgttctgagaaacatatctgtttattcctagttcagtaacagcgcaatgagatcctaaattatgaggtactttttgtttatcttattgtctcattggcaaccagcaactcctgttgcatttttgacatgggaatctatcagggtgtggttaataaagtacgtttccatggtaagtattctttaagaaaaaataaaccaagatttcatcagagacagaaattactgcaaactgtacttaccagtttctggtgatttgtataactgagctttcaatttcaaaaattaaaaagttctctttagtgtaacatatttttgtgtctagtaattttacttcaaaaataaaagagaattttctttaccatcaaacaacgttgctgtaatgagtggtgatatatttagtcctagaggaccaaagagaaataaaatggctttgattatgctggtttaagaaaatatatccgattaaacagaggttaatatttgtgatgtttgatttagtaaaattataagactaccaaagaaaactagaagagcaaaataaccaaaatttatataaagaattcaatgttgataattcaaaggtttagaattttttccacctttcaaatactaagttgctgttatagatttactaccattattacccagattttccattttactaaaaaataataacacagttcgttatgataaatcagtatagatctttaggctcaacacaaccctgctaccttttaaacttttttattatacaacaaacacatatgcattatcaagaaaagatgagtttagcaaaatgaagaaaaatagtcttatcaactagaaataagcaccattaaaatttctgtgtgttaaaagataatatactgctgaaactttttttttcttgaaatgtccctcttttctttcacttttcattttcttaatccctaaccttctactgttgaattttctggaccaccgttataccccctcatcaatagggcatttttttctgcagtagctgagcacaatggtcatattgaagaaattcccttgtgggggctttgcctagaggtaaaatcctcttggccgggtgcgttggctcatgcctgtaatcccagcactttgggaagctgaggcgggagcatcttctgaggtcaggagtttgagactagcctggccaacatggtgaaatgccgtctctactaaaaatacaaaaaattagccatcatagtggtgcattcctgtaatcccacctactcgggaggctgaggcaggagaattgcttgaatgccggaggcagaggttgtagtgagccaagatctagattgtgccactgtgctccagcctgggtgacagagcaagactccgtctaaaacaaaacaaaacaaaacaacaacaacaaaaacaaagtaaaaccctcttcactgtgatgactctaaagcttgcttttgtctctctaaatcacaacaaaccgtttgcagtgtgatgctgtgctcaaaattgagaattctcactgactgttccaggcatctgtctactcattcttgccatgctgagggctgtcatttctcaccactgaatgcctttttttttttttgtgcttctttttaaaagtcttttcctgtttgctttgaacttcaataaaaacagggggtaagaaggtaatatgcttttattttgtctgtggggtttttttcttccttcttttggttccttttcagatcctagctcatcaaggccatttgccacactgacactggaataagcctgaatgggggtctatatttcttccagtagttagtttaattcggtcattgagctgttgctctatttgtaaccgtcatgctagatccgagggctgactattcctgagaaagtgtggagatcctttcagactgccatggtgctagggcagagtttcagtcattatcttctgtgtctgctaattcttgcatcatttcttctactctgtaacctggttggctatgaaaagtgattcttcctcactgatgctgcaggcaatgggtgaatatccaattgttctctcaggttcttgtcatcggatacaaagaacaaatttcatgtgtccctgtttctgagaggttcaaagggagcaaatgcacagattctagcttaggatgacttccagcttctaactatttgtctgtgcattccatttcctcacccctgcgagaggttgcagtcatggtaacggctgttctgagaaattcagtgcccaaactggagggaggggaacacaaactcagcttcttcccaagcttcagggcagggctggcaagttttgccttccccgccagcaagagccctggctttaggggtcttgctacagttttcccagactggaggtcttggggctggattctggttcttagcgaattcttgccaaacacctcccctttccccagtatccatttgttttgaaggttctttgcaggcttcttgccaataattgtcttaaaacaaatggagttgtttgcatacctagatggagtaaaatatttaggaaactattctacaaatatgaaacagcccagatttgggccagaagtcctggtcctgagtctcttgttagccactcttaactgtgaattattggacaaatcatttctcgcactctgtgtaatctgtcacctgggtacttgatgatttaaaccaggaattgtggcccttctcataatactgtctcctaaatattgggtgaatttagtatatcaaggagggcagggcactatacccgtaggggactctctctctccctctgtctctttgcctttctcagatatgcatctttggtggcagacctggggttcaaaccacagttgttttgaaatttctctttccttctccactatgctccccctcactgaaactttaataataaaagtagcacacttattgggcatgtatttgttatgttccaggttctgtgctaacagctttaagtgcattattccacgtattttcacaacaagcctgtgaggaagaggttatttccacttatagataaagaaactgagacttggagaatgtaagtgattttacccacaaacacagggcagtaagtgggaggccctgttcaccttagaacacctggcttctatcattcatggtgctgtttctagtgtggtttgaagaacctgagatccaaactgctatacaagtgacctgctgctttcttggagagagaaatctgaaagacagtggagccctcacattgtctttgcctgtgcacagcagatactgccaattttgggtgggttacacttgtttaccacgttgcttacttcagaaatcaataaaattctcttcatgcttttattttacaggttcttacgtctgttgctagattatcgtccaaaagtgttaatgcccaagtgactgacatcaactccaagggattggaattgaggaagactgttactacagttgagactcagaacttggaaggcctgcatcatgatggccaattctgccataagccctgtcctccaggtatgttacacaaaacatccagagattacagtgaaagtcacagttaggagtagcacatagtaatcatgactataataattttacagtttttggttcccctatattatataacataactgagagaaaaacaactatgaaattattttccaaagatgagttttatttatatttatcacgcttatttgatgtggttatggataaatttaatttacaagtgacatgcacctctgaaatgagaagactggtctatttggctccatttttttctaagcaaaaatgactcatttgtgaatatgaaagcttatcatgtcaaaactgattaggatctaccataacaatagtggaactctgaaagcaagagacttctcctcttaagggatatgtctcagcacttcccttcaatcagaaggtctctaagaaagctgtcctggcactgaagcctgcaaaatatatttgcattttgcagctgaataactagacgaataagaaaagcaacaggcagaaaccaacagcttttttttttaaatcaatactttgaagggcaaactaatttcagatcacaaatccttcaaacactggtaaattagaagctaagcaaaatgcaattgtgcaaacatttcttcaactttgagtagagttgaaaaaaggaaaatagcacatgggttcatgtgatagattaatagaacaaaaaaggactgtagtatgtttcatggttgtcctcccaggcttccagcactcaagctgtaaaacaggatgggtcctgtttgtgaaaagattctaccagtctccctgtgcttcatgtccagattttaataaccgttatggaaaaatctcccctataacccaacccatttatacttaaacccatttacacttaaatcttctccaacacgaataaagaatggcgtcctggctttattataacctgctaaacacaatcaatttgctctatgaattgaaatctttgttcataattttaaaacctaaaatgtaaattaaaatgaacaaaatatgctttgcacatcaaactgtcaaggatttttgtctattgctttttcggttttgctttgttttattttaatttaagaagtgaatgtaaattgttacaaacttttaagaaatacatttggatatatgagtcaaaaatttgaaaaaaaattttttttaacttttttttcttattattatactttaagttttagggtacacatgcacaatctgcaggttagttacatatgtatacatgtgccatgctggtgcactgcacccactaactcgtcatctagcattaggtatatctcccaatgctatccctcccccctccccccaacccactgtttatacttgctaagatagcaattaatttatacgaaaataccctgagaaaataatcaaaaataaaggaaaatattgtacacatgatatttcattatcaatatgatgtaggattccttaggtaaattctggaatatttaaagactgaaatagtatgtatcaaagtcatgttttctgatatatttctaatataatcctcaattatataaaccttcttaagtaatttccaactgatctggctggattaactgattctccctgatccgtctataaaatatcctggatggcatccaaccatgttaaatactcttcccacttcaattccctcttgttgaattttaggcttatcaatatctaagttgcttccaaatctgtttatgctcattagtgttgtgatattcatatgtaatttgattgaatattgcataaattaatgaaatacaaatacagagaaaagacagattttatttctaagaaaactaggttgagtgctttggagaattcaataaagatgagctgctaaaatgttgttgatgaattttgtgagggaaaaataaaagttaagtagtaggaaaaatcacaaaaatctctaaagccattcatacagattattggtatgtttatgttttcctttcatcaaaaacgaagggagggagggagggagggagggaggagaaaaaaagaaagaaatgaaaaaggaagagaaaaatagacaaacaggaaattataggtgatgcattatggatgtgacttaagaaagaacctgggattataataacttctatatcacaaaattgtcaaatgattatatagttatattttataaattaaaacaaaatatttacagtatttttaagtgatttcctatgtaaattgacatttttgattaaatgatcaaagaagtcctccccacatcatcatattcaataagaaggattctatggtatactgcacacatatttcatatatacacattgtacatatatatatatacacacctgttatatatatgctcatgcatatacatgtatgtatgtattatatgcataggaatgcaacaaaataacggcaatatctccagattgttgatatatagttttttgtttgtttgtttgtctgtttttttgagatggagtctcactctgtagtccaggctgaagtgcagtggcatgatctcagctcactgcaacctctgccttctgggttcaagcaattctgcagcctcagcctcccaagtagctgggactacaggagcacaccacaacaccgggataattttttgtgtttttaatagaggcggggtttcaccatgttggtcagtctggtctcaaactcctgacctcaggtgatctgcctgccttggcctcccaatctgctgggattacagacatgacccactgtgcccggcctgatacataagttcttattatactttcctgccttttccaacatttctataataagcatatgtaccattatactaaaaaaagtattttaaaatctgattttcaataaaacaactacttattttcttattttaataaattttgttttcatactttggaggaacgaaagaacctgtggtttactgtatctccattataccaaggaagttgtgctaggcacattctgtaagataattcattaaagagaccaattcattcagagaccagtataataccactagcaaaaaataaaattatacttggacttgggttctgttttctttaaatattgctacaatgttatatagccctatgcactatttttgaattttgttctgggaatctccagtttgttttttactattgacagactattatctttacttactaaaatagcatatatatttacatgtcataatttgctcatgtagtaaatattttgttttatcaaaaagaatatatgaagttattaaggaattcatgttcctaggaaacacagcagaaattaattttgctgtataggtgagcagagcagattaaactgcttatatttttaaaactagttataccattaacaattagagtcactagtaatgtttttctcacacttcccttgatattttctgtcactttcttcttaattctctattcccttaccttcatctagctttccccatagcatttttttagcacttgatatcaatatatttatttgtgtattgtctgcctgcatcccaagaaggtgaagtctttggtgatgaagggtttatcttatttcctgcataatatcaaacttctaaaaagttcctaggactcaataggcatttaataaacacctatcagataaatgaattttttaagagaacacattacataatgctttctaatagcaatacagtgacaaactttatttttaaagtaaattaatgcaaatatgtatattatttaaaattgtttgtttttaagataacaagcctgatagataataaattttggcataaatatgttaatgcttatcaaaactcatcagtacatatcctgtcttttgatgaaaaagtaatagaaaggggagaacaaagagaactctcatgctcactaggcaggccgagtgcagctctgacagcaatgcaagagaaatattactatctccatcatatgcaggatgaaatttaggcttggagaaaacaacactttgttaaagattttatagctgctcaagatttgaccaaggcttttaaaacttcaaatgttcttttccttattacactgtttcttatcaggatttgtggactttggaaagtaaaatgaaaagtcagagcaatgtgagttagtttgataatctcagtggccagtaacagctatccccactctgaatatataccaaccaacctctcccctttctccaaggaagttagttcttggcaaaggcatttcatgcagtgtactttgtcattctaaccttcctttttttttgtatgctcctgttgctaatcatcctatttctatgggcttcagtcactcttttagcttttgtcttgggagactttctgtctgttgacatgacttttaaaataatcttctcccccattgtatttatatctcattagcctaccccccctccccttgtgttttagaagagttttattgtctgtcatccctctatacttcccaccctgttacctgcccgtgtcctgttcaaacacttgctccttttttccttgggcaggtgaaaggaaagctagggactgcacagtcaatggggatgaaccagactgcgtgccctgccaagaagggaaggagtacacagacaaagcccatttttcttccaaatgcagaagatgtagattgtgtgatgaaggacatggtaagagtcttaaaatgcaattgaaagaggccaatcttggaatttcatgtagaaccatttataagacaatttgaaattggggcctactgtggtgctatgttgacacacaggaaagggaaggacaggtggctagggtaccgcagaaccaggtgccgagctaactactggtctagacctttatgagtaagtctaggcaattcttccagatataggagaatgagtaaatatgaaccctaggaacagggttcatcagctcaaatcaaaagctcagaaattattttttttctggccttgacttacgcttatataatggtgctcgttcatggccagaaaaattcagaagcctgcagatacaaggacacagaaatccaaaaggtaggtaggaatgctccccctttctttggggatttagtttgtcctgataattccatctggggacctgaattttcatggatatctcaatgtattctaaggacccagattgaagtataacagaagtgtttctagttttgtttgacatgaagaaacctctggacataaagcttttcccatccctattcagcctataaagcaatgtttctcatccctggcagtgcattagaattgcttagggagctactaaaaatgtttcatgtttaggtcccacctcagggcaattacatcagagtctctgagtgaggaccttggtattggcctgatggagtaagtctggggtagagcctaacattctacatttttaacaagctcccaggtgatgctcatgctgccagtccccaggtcaccctttgagtgttaaggctagagactagaggaacaggggagacgtctaagtattggtgaggtttgtcttggttgctgctaaatgattgctggccatttcaacctggggtttcctgttctgtgtttaaacactgactgtattactggtgtcatgctgtgactgttgatataagcagtggatctcaaaaatccatgcagctcctgcccaccattttcatagtctgcttataattagccgctataactaatagtttccaaactgattttctaggcttagaagtggaaataaactgcacccggacccagaataccaagtgcagatgtaaaccaaactttttttgtaactctactgtatgtgaacactgtgacccttgcaccaagtaagttttagtctttctctgattaaaacactagatataacatgagagttatcattttcctagggaagtaacactgactgagagttaagaattagggttctagtcctgctttgcctccaagcaactagatgactgtttgctcatttaaacactggtgaacttcctgtgtaggtgacactttgctggccacttaagctaaagatatgagccagacatatgcctggcatcaaggtatcagtccagaagcacagacagtcaaggaaagcaatggttattgtgtttcaacagcatgagaatagcatcagaagagacttatgttccaggtgttacaaattatacagaaaaacttttcaactctgcctgaggagatggaggtgaagacatgaatgtgtctcatgacttgaatcttgaagaaagaaaagaaagagcattaacaggtgcacatggatggaatgcacattataggcagggaaacagcagctgcaaagagacaaaggaagctcaggaaaacagaatacctggctggagtgtaggaaagactgagaagcgttcagggctgaatcatgaagggccttgtcttttaggctaaagaggttggttttgacccaaagttagagaacctgccttgtaagtcatcttgggaagcttttaggagttcatctaataggcttaagaaataagcacatgatgccttatgttttatttgctaggaaaattttatgtacagttgtcccaggctctcccctggccacaagtgtctgagagtgcccctatgatgacaggctaggtaggcattggggaagcagctgacttagtaaaataataacaataatagtaattccaaatatttcataatcttgatttaattttcttgtcatcataaccttttgaaatagataatattatttccatgttattgatgagataaaaggctcatggcagtgtgacttcccaagctcacctagtcaggtaatgggcagaggctgtgaactcagacaacctgattgtgaatgtttgtctgtctgaaggaaatcacacatgaacctcttgagtctcctgatcaccaccggttgctaaaagtggcagcctctaagggccagctgagtaccctccctgagctacatcatgggcttggctatcacctggccattttcttggtctataggaattttttgaaattacttttgacagtttattttaagagctagtttaagctataggatttacgtgttcagtttattactaggtttaagtttatttttgtatccacttcatctctcttgtgtgtcactattttcctatcttcctttaactcttgaaatcttaagacagtcattccttatgatatttttcatccagccatccaaattatattaacttgtgccagctttagatactaatttagaaatatttgaaggaatacgtttgccagagatgcaaagatgaataaaatggcccctaatttacaaagtgccattgaaaattataaaggaattattctgccaggcttttgaatttctcctgtatttttttttctagatgtgaacatggaatcatcaaggaatgcacactcaccagcaacaccaagtgcaaagaggaaggtaattatttttttacggttatattctcctttcccccaaccccatggaaagatgtgaagaaaaaccaatcactcttgattagtagaaagtcctttatttaatcttaaagattgcttattttcatataaaatgtccaatgttccaacctacaggatccagatctaacttggggtggctttgtcttcttcttttgccaattccactaattgtttggggtaagttcttgctttgttcaaactgcagattgaaataacttgggaagtagttcacaaagatttgcctcattcttacctataaaaagctaccactttggtagatttatgtattgttaatttcttgcccctgaatgcagccttgagagctgactgataagaacaaatgaaattattcctcagctagtttctgagcaacagttttggggcattgagtggtattctcatccttcctatgaacaggtgttctctgcagcagcagaattggccaaaaatcagaagtaattcttcactattcattgagatctccctatgcaaaaagagaacacaagaagcaaaggcattcccaggaaacacattgcagggaacactttaaaaacttgtacttcactgcctcctcttcctcggcctaattgcttgtttttaattatttctccttcttaacttaaaatactatggggacacatgttatacaaaggtgacttagtagagtcagtagaaaagccaaaattagatattatcataattagtctagaaaaatccctttaagtcattcatcaactacagggtcacaccaactttcagtaacttagaagtattcaattttcccttctcagaacaattatctgtttcttcagttcagttgaagaagaaagtttgccttgcctttagcggttgtttagctgaaaatacatttgggatatttaagcactgtaattgtgctcagagacatacagattcttctatctcacattgactttaatgcatacacctattgagtatgtatgcttgagttatttgtgtgtgtatttcatttctgggcatccatagcaagttgatgttgacttgcttgtcctacggcttctgcatcctgccatagtcttgccgtccacatctttgctggacagagagtggtgcttgccatatggtaagtcaaaagccatctccttgctaggccagcctgtggtaattagatgactaattaagatatgtcctttcactagaacacttgacttagtagtacgaaagttccaaaatcagcggtctcctgcgatgtttggccacttttaagtttcactgaatttctcctttttccttcttatatttctcttagtgtgaaagtatgttctcacatgcattctacaaggctgagacctgagttgataaaatttctttgttctttcagtgaagagaaaggaagtacagaaaacatgcagaaagcacagaaaggaaaaccaaggttctcatgaatctccaaccttaaatcctgtaggtattgaaataggtatcagctttccttgaaaagaaaaatagagaaattagtgatttggctttttgttacttccttttacttttttgtttcttgtttgtttcattttgtttgagatggagtcttgctccatagcccaggctggagtgcaggggtgcaatcatggctcactgcagcctcaaagtcctgggctcaagtgatcctcctgcctcaactgtgaccctgggactacaggcatgcaccaccatgccaggttaattttttatttttattttttatagagacagggttcactttgttgcccaggctggtctcaaacttttgacctcaagcaatccttctgcctcagcctcccaaagttctgggattataggtgtgagccatcacatccggcctgttactttctttatttaaacattgcttgtgtttgtgggtgcataggttaaaggggcctcacagatgaattatgatatggtacccaaattaaaagtaaacttgtacacaaaaaccgtaagaatcaacaaaggagggaattgagagtgtgctgaaaatgagctgaaaaaagaacttggccaacctccatgttccgtgttgttgttatccctgcagagaaacagcctttaccaggcatgggttcagtatccaagcctgagcaaagagattgctcttaaagtttgtcataagggcacagcttaactttctctggctgccggttgaccttatgtctcaccatatcttttcccaacatggtatcaatatatttcagatagcaagaaatacaccgagaaaagaaaccagttgcacttaatggaattattttcttatttggggccagggctcagtgggagttaggattctttaaattaatatggtaaaaaaaatttcaatttgagccattttctggtattaagaataagaatagttacagggaagaaaattttagagtagttatatttattatttattttaataagtctatatgaaaaataacctcaacctattttatgaattctttaggtttcttgcctttaaaaactaagacaatattgcttagtttctggcaaggccggaacctttcagaataaaaattgaatggtaaaagtaaccttcttaatcacttaatctagcttcctaattttatacatcaagcaactgattgtacttctttctgaattaaggaaaaattagaagttcacatttagaatattctaaagatatatttttatttgtctttctctgcttccattttttgctttctaggaaacagtggcaataaatttatctggtaaggcttttatcattttatttcatagagatggcatcctttagagtaataggccaatttcagagtaaaataatgttactaatttcagtgacatattatgggatcttgttatttctcatacaattctacctgctcagcataaagcatttatcaggcagtttgtttaaatttataatgaatactcatagttaaaaataatcaagtaacaataagacacaatagtctgaggcttaagaaacttttccttcataatcagctagatgtattacagaactcctgcctaaaaagatctagaggttaaagtgtactgtagactcaggtattatcagtgtacccaactctataacaacatacatgattccattcagttgttctttgatctgtgatttagagataagatgatcataaactctttgcttatacttttagatttgtgggtcattgatcattggatccataagagatgttataggtgatcttttccaatcctcttaatttataaatgagaaaagaagatacagaaatgttatgtattgtggcccaggttatttaacaaattactgggtatatggcaggatttggagttagaactcaaggttgtcttgtttctgtattcccctagtcagctcttcatagacctttaggacttagctatattctgaagtactataaaaagagaaataaacatggttttcactaatgggaatttcatttagaaaaacaaattttcagactattttctatttttcagatgttgacttgagtaaatatatcaccactattgctggagtcatgacactaagtcaagttaaaggctttgttcgaaagaatggtgtcaatgaagccaaaatagatgagatcaagaatgacaatgtccaagacacagcagaacagaaagttcaactgcttcgtaattggcatcaacttcatggaaagaaagaagcgtatgacacattgattaaagatctcaaaaaagccaatctttgtactcttgcagagaaaattcagactatcatcctcaaggacattactagtgactcagaaaattcaaacttcagaaatgaaatccaaagcttggtctagagtgaaaaacaacaaattcagttctgagtatatgcaattagtgtttgaaaagattcttaatagctggctgtaaatactgcttggttttttactgggtacattttatcatttattagcgctgaagagccaacatatttgtagatttttaatatctcatgattctgcctccaaggatgtttaaaatctagttgggaaaacaaacttcatcaagagtaaatgcagtggcatgctaagtacccaaataggagtgtatgcagaggatgaaagattaagattatgctctggcatctaacatatgattctgtagtatgaatgtaatcagtgtatgttagtacaaatgtctatccacaggctaaccccactctatgaatcaatagaagaagctatgaccttttgctgaaatatcagttactgaacaggcaggccactttgcctctaaattacctctgataattctagagattttaccatatttctaaactttgtttataactctgagaagatcatatttatgtaaagtatatgtatttgagtgcagaatttaaataaggctctacctcaaagacctttgcacagtttattggtgtcatattatacaatatttcaattgtgaattcacatagaaaacattaaattataatgtttgactattatatatgtgtatgcattttactggctcaaaactacctacttctttctcaggcatcaaaagcattttgagcaggagagtattactagagctttgccacctctccatttttgccttggtgctcatcttaatggcctaatgcacccccaaacatggaaatatcaccaaaaaatacttaatagtccaccaaaaggcaagactgcccttagaaattctagcctggtttggagatactaactgctctcagagaaagtagctttgtgacatgtcatgaacccatgtttgcaatcaaagatgataaaatagattcttatttttcccccacccccgaaaatgttcaataatgtcccatgtaaaacctgctacaaatggcagcttatacatagcaatggtaaaatcatcatctggatttaggaattgctcttgtcatacccccaagtttctaagatttaagattctccttactactatcctacgtttaaatatctttgaaagtttgtattaaatgtgaattttaagaaataatatttatatttctgtaaatgtaaactgtgaagatagttataaactgaagcagatacctggaaccacctaaagaacttccatttatggaggatttttttgccccttgtgtttggaattataaaatataggtaaaagtacgtaattaaataatgtttttggtatttctggttttctcttttttggtaggggcttgctttttggttttgtcttccttttctctaactgatgctaaatataacttgtctttaatgcttcttggatcccttagaaggtacttcctttttaaccttaacccttttagtagttaaataattatttccataggttgctattgccaagaagacctcttccaaacagcacatgattattcgtcaaacagtttcgtattccagatactggaatgtggataagaaagtatacatttcaaggggtaggttttattattaagaaagccaaatgaggattttgaaatattctttcctgcatattatccattctagctacatgctggccagtgggccacctttcttttctgcaatttaatgctagtaatatattctatttaacccatgagtcccaaagtattagcatttcaacatgtaagcatgtcggtaagatagttgtgctttgcttagggttccctcctgtgttatggtctggaaagtgtctttaggcagaaagtctgagtgatcacagggttcactcattaatttctcttttctgagccatcatagtctgtgctgtctgctctccagttttctatttctagacagaagtagggcaagttaggtactagttattcttcatggccagaagtgcaagttctactttgcaagacaagattaagttagagaacaccctattccactttggtgaactcagagcaagaactttgagttcctttgggaggaagacagtggagaagtctttgtacttggtgatgtggtttttttcctcatggcttcacctagtggccccaagcatgacttctcccatgtcaatgagcacagccacattcccgagttgaggtgaccccacggtccagaatcatcctcattctggtgaacctggttctctttgtggtgggcatactgggtaggagaatcacccaaaggtcacccatgagctgcagaaaaaaaggctatttgcagaaggagctcacagatcacattgaaagcattgcatattcaaacatcttggtcttctttattggcatgcccacagggtcttctgacctctgattagatcagacactttttagatattgaatcatcagtttctgtacaactatctgaataaggtatataatcaatgaaatttagaatttttttctatgcttactcctgattggtaatttgtttgggtttagaattctatacaaggccatttgtaattttcctcagcactttaaaaatattaaaccatgttttcttaacatctgttgctgttgattatgtctgctcttggtgtaaatatcattcctttgtaggtaatctgtaattttttttcctctggtaatttttaaagcttcccctactactttcctatgtgttctgcagtttcacaacaatgactttcaatgtgtatttatttttacttaatctatttaataagatttaattagaaaggcagggctttcatcatttctggaaaaaatcccagctattttctctttaaatagtgtttctttaccattctcattctcttcttctgaaactgttgttattatctgttgaagcttcttgagttattttctaggtctcttaattttttttaaaacaataattgtctccgtatgttgcattttaggaaatttctcattactctttttaaattaactgttagtttttactaagcccggctagaatagtctatccactgaggtatgtattttgttttctatatttttcattcttaatgtttcttattgttccttttacatttttacttgtatatgtttcattcctgctttttttaattttctttcttctttctcttttctctctttttttttttcttcttgcagtgcagacagactttattagtacagcagaggtgcccacagagcaggcagaagggatcagtgcctggatctgtcccttcctccttctgccctcgctgagccctagtgtgtccggaattggtgggttcttggtctcactgacttcaagaatgaagccgcggaccctcacggtgagtgttacagttcttaaaggcagcgtgtccggagttcattccttctgatgttcggatgtgttcggagtttcttccttctggtgggtttgtggtctcgctggctcaggagtgaagctacagaccttcgcggtgagcattacagctcttaaggcggcccgtctggagttgttcgttcctcccggtgggttcatggtctcgctggcttcaggagttaagctgcaaactttcgcagtgagtgttacagctcatgaaggcagtgtagacctaaagagtgagcagcagcaaaatttattgaaaagagtgaaagaacaaaacttccaccctatggaaggggacccgggccagttgccactgctggctctggcagcctgcttttattttgttatctggccccacccacatcctgctgattggtccattttacagagagccgattggtccattttacagagagctgattggtgcgttttgacagggtgctgactggtgcgtttacaatccctgagctagacacaaaagttctcaacgtccccactagatcagctagatacagagtatcaacacaaaggttctccaagtcaccaccagagtagctagatacagagtgtcgattggtgcattcacaaaccctgagctagacacagggtgatgattggtgtgtttacaacccttgagctagatacagagttgccgattggtgtatttacaatcccttagctagacataaaggttccctaagtccctaccagactcagaagcccagctggcttcaccccgtggatcctgcaccggggctgcaggtggagctgcctgccagtcccgcgccatgctcccgcactcctcagcccttggatggtcaatgcgactgggagccttagagcagggggcggtgatcgttggggaggcttgggcatggtgggctgcaggtcccgagccctgccccatggggaggcagctaaggcctggtgagaagtcaagcacagcagctgctggcccaggtgctaagcccctcactgccccagggccggcggggctggctggccgctcccagtgcagggcctgctgagcccacgcccacccggaactcatgctggcccacaagcaccatgtgcagccccggttcccgcccatgcctctccctccacacctccctgcaagctgagggagccggctccgaccttcgccagcccagaaaggggctcccacagtgcagcagcgggctgaagggctcctcaagcacagccagagtgggtgccaaggctgaggaggtgctgagagcgagcaagggctgtgagggctgccagcacactgtcacctctcactaggaggctggggcctggcctggaccagtttctcttgttccacctgaaacacatgagaatggagagcttagggctggccttgcttctggctcctattgtcataactctaatgttatcacttcattgaaaagattagacctctccttccccagtccctaggcagggaaccccagccactggggagagacaactttgtggggcctgggcttaggtatatcctctagacacttccgaccccaccccacaccctttagttctctgaggctcaacgcactttctttatttcattgacaatttatcatagtttaatataacttattccattatttaccttcttgaagatcctactgagttattttagagtcttttttagagttgctctattattttaattttaactgcagtgatttcatgctgactttgtaggctggctttcctcatgtgattttccttatgaatttttgaaatttgtaggcttatcttgaatagcccatttttttctctctgcactcatctctccatatttaatagttctgtgtgttcttttgccagttcttccagagtccccagttctgagccaagatttactgagataatcttgaggctcatacatcatggtgatatcaggactatcacagattcagtcatgcatttgggggcagcttggctcagccactggtcataggctgtgccgaatcttctcagacccttaggcctgtagcttcctagaagccacagtcccagggagtgtttggcagtaggtctgtcttagtagctctgtcttagctgtcttccacaagacagaaagttcagagagagaagaaggaaaagaaactggttaggcagacagttaggaggggtccttggtaaaactccttcaaacagagaaatagcctgaaaaaatcaaagctacaggcacagatagagcagcctggggaaaaatttagctttagctgcagagataagggagcaaggcctaacaaagaagcctttgttctttggataatcagcgggctcccaggaaaaagtttcctccccttttcagacatgtacatgatgggctccatgggaacttgcacagggagaggggcttacctaaaacatacccacagtttcataaacaagagaagctgtactttgtgcttacctaagacatacctgcagctgcacaggtaaggagagttacacagacagctactacacagttaagggaagttacacaaacagctacagagatgaaaggagttttttcttataaaagcttttggattcaactgtaaaagtggcaaccctctttcagcctcctctttgctgcagagagctttcttctttcaattattaaacttttactccaacctcacccttgtgtccaggctccttaattttcttggtcatgagacaaagaactccaggtactacctcagacaacaagactgaaacattgtggtgcactggcaagactgcaacagttctacatcagcccgtggttttaagaagggagcctggttcctgttctgcctcaggtggggcacatttattccgtaccaaacctaaaagcaggctttgctttgcttccaagcattgatccaactaagctttggcttgttgtgcacaagtcatcatcttgtagttgtttccattcttataccatgaaaggattgatcttatttttgagcttggctatgcctttttattttcctttagagacgttctatgtatcattgctatttgctcagattggtaggaggtggccctcaagaaatgaacttacaatttggtattaaccccagggcccattagataactagaaacaatgttttgttttgttttacatttttaagttaaaactaaggatcaagttgtttttcagttatatagggccctttgacaggacttgatatggtttggatctgtgtccccacccaaatcccatgtcgaattgtaatccctaatgttggaggtagggcctgattggaggtgattggatcatgggggcggagttctcattaatggtttagcaccaatcccttggtgctgttcttgtgatagtgagtgagtaattgtgagatctggttgttttagaagtgtgtagcaaaggccgggcacagtgactcacacctgtaatgccagcactttaggaggctagggcgggcagatcacctgagatcaggagcttgagaccagcctggccaacatggtgaaaccccgtctctactaaagatacaaaaaattagctgggcgtggtggcacacgcctgtagtcccagctactatggaggctgaagcagggagaatcacttgaacccaggaggtggaggttgcattgagctgagatcgtgccattgcactccagcctgggcaacagagcgagactccatcccaaaaagaaaaagagaagtgtgtaccacctcccctgacccttgctccttccctggtcatgtaagacatgcatgctttcccttcacctcccaccatgtttgtaagtttcctgaggccttcccagaagcagaagaagctacatttcctgtacagcttccagaaccatgagccaattaaacatcttttatttataaattacccagtctcggctgggtgcggtgactcatgcctgtaattccagcactttgggaggccaacgcaggcagatcacaaggtcaggtgtatgagaccagcctggccaacatagtgaaaccccatctctactaaaaatacaaaaaattagccgggtgtggtggcgggcacctgtaatcacagctattcgagaggctgaggcaggagaactgcttgaacccaggaggcagaggttaaagtgatccaagattgtgccattacactccagcctgggcgacagagcgagactccatctcaaaaaacaaacaaacaaaaaattacccagtctcagttatttataccaatgcaagaacagacaaatacaggactcaggagaaaagaaaagagactgtagggtttcccacataggtctgcatcttatgatagtggtgaattgagagtcatacagatctgggatcaaatatttattttcctcataaaggtagaaacaaatggcttaatctcttcgagtcttaatttccttattttttgtgaagattaaagtgtatatgaagtatctaccagtgtttagctctgtaccttgatagatggtaacaacaacaataaaaaacctcagatgcttaagcaaaatggaaatttattgacatatgttactagatgctcagatatggggtgggtttgactaacctaaaccagtgcctccagtcaagattccttgttattttcttgaatctaccctcttcatttatctacttcttgtccatctcttcatatatttgcttgccaaactggtagtgacaaggtgcctgcaaccattctcgacctatctaaatatcacagtccagaagaaatgacacttatgccccccgtcctccaagcacctcccctgacccttgctcctgctgctccttgctgctgagagccattcttattcaactgtttagatcataagcgacctctgaattaatgacttatgattggagaattggatatgtcgattggcttaatccacaggccccattcttggagcctggcataggatcagcttcccctgagtgtcaaaagattgggagtggggaggcaggaggacttctgttaagaggatgatagagggttctgggtaggagtgtcaggatgtgtttaggtactcaagctgacttaaactgtagaaaaaaatgtattacctcatatgacaggcagtccaaaggtgtggctcactgaagcctacttgtaccagctcacaagagctaattactaaattcttaggaattttgaaagccagttgttaaatcgttgatagcttgatattgtcatactgggagtatttacactatagaaattgtcaaaggctacagatcaggaatctcccccgacccccacaaagacagttactggctactgggcagaagtcagtgttggtggctgattcagtgtctcaatgatactatcagggtcacaggattcttttctagttttccaatctgtagcttcaacattggcattcaattagagttatttgtttttgcatggtcatccaatggctttatcagtgaatcaacagcatgattctttatccgtattcaatagcaaagaaaaagagagaaaaacatgaaaaaattctcccctcagatatggatcatatacctggccttttagtatgattgagccaaatttagtcgtctgcctacctgtgtggtctgccatatactgattgactcaggcaactcaggagccacctctggagctgtggacaggatcagtttctcctaagctttatgagttatgggaaaaagtagatcagaatggaaatactactagaaaaacaaaagggtgaaatggatgctgaatagtttcctctgtagaaaagaacaaacaatatcaactacacatattctccatgtccctcacaagttgagtaggcacttatagagaaaatctagatcctagggcaaaaggaagttcattgttattggccttactgtttcagaacccccaaaacagacacatggacttttttatgaagtaaagagatcttcaagaatctttacaccttttaaatgacctcaactgagtctaggtcaagtcatggctgctggagaatgtttttgattggatttctttgaaagaagccttgaggcaaggtttgggtacaggtggttcatttaagacgtgattccaggaaacatggtgatgatgttgtaaagtaagacagggaataaggaaaagcccatagtgcaggccctgataactatgctattgctatagacaagtggggcccaattctactggggtccctctgaaaggctatgtaggacaaacctccacattgtaccaacaaggcacagggaagctgagtcttgacaccaactccagtctttcattggttgaggggtctttctagggcattaactccctaatatccctaatacttctggcctgtcttcttccctccagctttggtatcctgaggacagacacctttaagcagagagatggaggaggccatgtgtcacatttgttagcaggtgatctcttgatgatccagggtccaatagtgtctatggcaaacagcaggctgctgagatgtctaagtatagaaggactagggtatctcatgggataactcgttctgcatgaaaaaggtaatgggcatggtgaattttgtttattaagaacaccttagttggtgacattaattttcagtatagattggcgtctattgcttaaatctcttgcccatggatgaaagcaaagaaaaatcaataaagaaagttgaaagagctattttacaaagcttggaaaaacactggtctctcatccctgtgtcaaaatatagtgcagatttatccagacatccaatcttcctttcctttcctcgcttctcccctctcctccttaacacgtgcatattgtccaaaccaccatcttgctttggtataaggggaattccactcttgtgggtgtccaaaggccactcctgtggaattcttacccttatgccatctaaaccatgcacctctgatatgcactcacatataattgtcttctgtagatgtttaattatctcccctttgctaggccataagccatctgagggcagaaatcatgattagcacagagtaggtgttcagtcaacatttcttgaatgaatcagttaatgaaggaacattatgtatgcagtagtcatttgtgttctgtatgactggcatttgatggaaaagtcacagcgagtgttagggaagctgaacttttttttttttttaaacattgtatcattaatttatcacgtgtatccaagctcctttgagtttccctgcccccatccctgtgtcattccagccatatccagctactccttccatgcttcccccattcttgtttctgactctattactcccagtccaaatcttgctcttcactgtctgcaccttgtgctctcctctctctcaaaaaaatctacccaaattccacccctcttcacaggcccagggaaatcactagttcccgcaggaggctgtaggctgtaaccaactctctgaaagctttgagtcctctctgaggtcatctgtgcttgtcctcgttccatcaggcactcctatgttacttgacctgtggtctgcatgtacagatcttgtaccccatatacattgtaaggtccttgaaggcagaaaaggaagcataaagaagtgggtaggagtgtaagctctgaagactgtgcatttgaatccctgccattcctagatttgggaccttgtcaccttgggcaacttatttacctcctctgggccttagttttctcacttctagaagagggaaaatgatagtatctgccatgtagtgctgctctgaggattaaatgagatactccacttagagcccatggaatggtatctggcatgtgataagcactaaatatagctttcctataattacagtaatgcccagggctccacaggcccagcccagcaccagtacaggaatagtatgacattgatgctagagttggcagattgaggagaacacacaaagggctaatgatgttcaaatacacatcagatttc

SEQ ID NO: 1292 - DNA, 2551 bp, Homo sapiens
gcaagagtgacacacaggtgttcaaagacgcttctggggagtgagggaagcggtttacgagtgacttggctggagcctcaggggcgggcactggcacggaacacaccctgaggccagccctggctgcccaggcggagctgcctcttctcccgcgggttggtggacccgctcagtacggagttggggaagctctttcacttcggaggattgctcaacaaccatgctgggcatctggaccctcctacctctggttcttacgtctgttgctagattatcgtccaaaagtgttaatgcccaagtgactgacatcaactccaagggattggaattgaggaagactgttactacagttgagactcagaacttggaaggcctgcatcatgatggccaattctgccataagccctgtcctccaggtgaaaggaaagctagggactgcacagtcaatggggatgaaccagactgcgtgccctgccaagaagggaaggagtacacagacaaagcccatttttcttccaaatgcagaagatgtagattgtgtgatgaaggacatggcttagaagtggaaataaactgcacccggacccagaataccaagtgcagatgtaaaccaaactttttttgtaactctactgtatgtgaacactgtgacccttgcaccaaatgtgaacatggaatcatcaaggaatgcacactcaccagcaacaccaagtgcaaagaggaaggatccagatctaacttggggtggctttgtcttcttcttttgccaattccactaattgtttgggtgaagagaaaggaagtacagaaaacatgcagaaagcacagaaaggaaaaccaaggttctcatgaatctccaaccttaaatcctgaaacagtggcaataaatttatctgatgttgacttgagtaaatatatcaccactattgctggagtcatgacactaagtcaagttaaaggctttgttcgaaagaatggtgtcaatgaagccaaaatagatgagatcaagaatgacaatgtccaagacacagcagaacagaaagttcaactgcttcgtaattggcatcaacttcatggaaagaaagaagcgtatgacacattgattaaagatctcaaaaaagccaatctttgtactcttgcagagaaaattcagactatcatcctcaaggacattactagtgactcagaaaattcaaacttcagaaatgaaatccaaagcttggtctagagtgaaaaacaacaaattcagttctgagtatatgcaattagtgtttgaaaagattcttaatagctggctgtaaatactgcttggttttttactgggtacattttatcatttattagcgctgaagagccaacatatttgtagatttttaatatctcatgattctgcctccaaggatgtttaaaatctagttgggaaaacaaacttcatcaagagtaaatgcagtggcatgctaagtacccaaataggagtgtatgcagaggatgaaagattaagattatgctctggcatctaacatatgattctgtagtatgaatgtaatcagtgtatgttagtacaaatgtctatccacaggctaaccccactctatgaatcaatagaagaagctatgaccttttgctgaaatatcagttactgaacaggcaggccactttgcctctaaattacctctgataattctagagattttaccatatttctaaactttgtttataactctgagaagatcatatttatgtaaagtatatgtatttgagtgcagaatttaaataaggctctacctcaaagacctttgcacagtttattggtgtcatattatacaatatttcaattgtgaattcacatagaaaacattaaattataatgtttgactattatatatgtgtatgcattttactggctcaaaactacctacttctttctcaggcatcaaaagcattttgagcaggagagtattactagagctttgccacctctccatttttgccttggtgctcatcttaatggcctaatgcacccccaaacatggaaatatcaccaaaaaatacttaatagtccaccaaaaggcaagactgcccttagaaattctagcctggtttggagatactaactgctctcagagaaagtagctttgtgacatgtcatgaacccatgtttgcaatcaaagatgataaaatagattcttatttttcccccacccccgaaaatgttcaataatgtcccatgtaaaacctgctacaaatggcagcttatacatagcaatggtaaaatcatcatctggatttaggaattgctcttgtcatacccccaagtttctaagatttaagattctccttactactatcctacgtttaaatatctttgaaagtttgtattaaatgtgaattttaagaaataatatttatatttctgtaaatgtaaactgtgaagatagttataaactgaagcagatacctggaaccacctaaagaacttccatttatggaggatttttttgccccttgtgtttggaattataaaatataggtaaaagtacgtaattaaata

SEQ ID NO: 1293 - DNA, 1008 bp, Homo sapiens
atgctgggcatctggaccctcctacctctggttcttacgtctgttgctagattatcgtccaaaagtgttaatgcccaagtgactgacatcaactccaagggattggaattgaggaagactgttactacagttgagactcagaacttggaaggcctgcatcatgatggccaattctgccataagccctgtcctccaggtgaaaggaaagctagggactgcacagtcaatggggatgaaccagactgcgtgccctgccaagaagggaaggagtacacagacaaagcccatttttcttccaaatgcagaagatgtagattgtgtgatgaaggacatggcttagaagtggaaataaactgcacccggacccagaataccaagtgcagatgtaaaccaaactttttttgtaactctactgtatgtgaacactgtgacccttgcaccaaatgtgaacatggaatcatcaaggaatgcacactcaccagcaacaccaagtgcaaagaggaaggatccagatctaacttggggtggctttgtcttcttcttttgccaattccactaattgtttgggtgaagagaaaggaagtacagaaaacatgcagaaagcacagaaaggaaaaccaaggttctcatgaatctccaaccttaaatcctgaaacagtggcaataaatttatctgatgttgacttgagtaaatatatcaccactattgctggagtcatgacactaagtcaagttaaaggctttgttcgaaagaatggtgtcaatgaagccaaaatagatgagatcaagaatgacaatgtccaagacacagcagaacagaaagttcaactgcttcgtaattggcatcaacttcatggaaagaaagaagcgtatgacacattgattaaagatctcaaaaaagccaatctttgtactcttgcagagaaaattcagactatcatcctcaaggacattactagtgactcagaaaattcaaacttcagaaatgaaatccaaagcttggtctag
